United States Patent Application Publication US 2025/0051766 A1 - sequence listing, part 12

SEQ ID NO: 5065 - DNA, 58617616 bp, Homo sapiens (residues 21,710,231-23,881,253 of 58,617,616)
  source 1..58617616: mol_type = genomic DNA
acttgttctatgttcttataattttgaaaatacagttgacacttgcatgacttatgaagtttttgatagtctaatgtcacttgatgttccaagaacagtatattttaaattaagaagaataaactgtatttgttttatatatttaaggcttacagtcacaaatttgaaaacttcaaagtctggttttccatctattcatacataaaacagtgtagcgtgctgaaacatttgtttttttaaagtggcagccacagttcctgtctgtctggatatattttaaacttttgtgtgttaagcttaacataagagacttcattttgttttaggtaacctaagattgttgtacccccccccccaaaaaacttcacagattactgtagggttcagcaaactgtttatataatctaacattagtatctctattttctaatgtctagattttttttagaaaagattgttttgtttttatttttgttttacaaatgtctccacaaattctggcttattttataaaataacagaatactaaagaaatgggtgctttgccatactatgtggacactggcactcaatgtccaatgcccacattggatatttggataaaataccaaatatccaaatattttaatcaaaatttagtaagtttaaataatttgattttttcactacagtgatagacattcacaaatatttcatatattaaagctatcagtgttaggttttacttagtagtaatatatatataagatcaagaatctatttaaaatggatatctttcatcaataatttggtgctttcaaatacccagaagtcttgttttaatcatattaagtctgagaataatttactaatttcatttttggaataatgtgttcaaaatgttctagtttaacctagtgttgattgatgatgggtaaacaaatcaatttttttcaaatctcataggtatattatgttattgaagatgttttcaattaaaattctccctttcaatattgtttacaggaatgtaggtctagtccaatctgctcaacctgttaatcagtgtcagctgccagattccaattcgtttttagtgtgcctgtacttttctttccataacctctgaattcatttctattacttatttaaatgttatataataaagctcatatatttaaaacaaaaccagcaggtaaaatgagttctggcttagaataaagaagctgttaccgagttacatatacagatgcatgcagctcaacaaaattttagacaaaaagtattggactgaactataacatgtgttgctatgactaaggctctaatgaccttaagaataaagacaaatttcagcaaatttatccagttgctttcagtacatgtaaaggtagtacatcaagaattctcatgctactgcctgagaaaacagattctactgttacctaataaatcaaaatcaactggatggcgtttctataaccttgcaccaggtaaagaaaaactgcaatggaggactaattaacgcagactccatcataaggaaaagggtaatccagaatgtcactttcaatatttaagtatttaaatttttagttgaaaatgtggtgaaatagtgcttttggtaagctttgtgtagttgaacatcagcattaagtagaaaaaaatctttaaaaatgtaaacaaacaaaaccatacaccaaaaaaactaacttgaccagtgtgtacatattgatctttgtgttggtagagtctaaagcagaacatttggtgaacttgatacaattattttgatcacattggcataccaataaaatcacttatattgggtcaggtgcggtggctcacacctgtgatcccagcactttgggaggccaaggttgggcggatcatgaggtcaggagtttgagaccagcctgaccaacatagtgaaacaccgtctctactaaaaatacaaagattagttgggtgtggtggtgcacacctgtaatcccagctactcaggagtgagggtgaggcaggagaatcccttgaacccaggaggtggaggttgcagtgagccaagatcctgccactgcactccagcctgggtggcagagcgagactccatcttaaaaaaaaattatttatattcagtttgaataaaacattttcacatcttaaaaatactgctttgtacttagtatgaacaataaatgtaaagtctttatcctcaaacggattctgattgtcaactcaatacatatggcaacccatttctctggtttatccaaactgaagtcttgtgaaggctcaaatatagaatgagagggactcaacaacagagcatgagaagcaagaaggatggggtaggatgatcagccctaaggctcagggattcctggggaccccaatataatgacatcaactatgaagcttactaactgaaaataagcataagcagctgaaaactccatggcttgctttggtgggaaggagtctctggaattagagtcatgccaaaaggattgagccagaatgacacgtctctaaggattattaggggggactgttcataagcacataaacatttgttccaaatcttattacagtagcaatatccttttctgtaatatcagcttccccaacgtacggttgccatagacaaactaagacaagtgcctaatatgttgtaggcaattagtttctaaatttaaaaaacttgcaataattttatgaatttcattaaactctgtttcatgtataaatctcactgaaaggcagtatccagtagctattttccttagtcctttctgggattttctgttgcttgattccaaaccaaccttaatttaatcctagtcatttctaaatccccagatggaataacagaaagacagcagaaatgaacccaagttaccccaaacagtcaacatctaacatattttgttccccaaatgaacaaaaaatcacacaagctaaaaaacagtgggtttaaaatttaacccaaatttaacagtagcagttttaccatatgtaaaaattagcaaagtcataacttagatacccatagtccgttattctagaaaaaattaatacaattatgacttttttagaaaagaataaatatgacaaaatatacccgctcatatctttgaaatatgaatgattttttcttttaatatttaatacttagacaagtattatagctatcattcatgaattaaagtagccttaggggaaatagtgttttatattaataatgaagattgaagctccagggatgtcaaataatttctcttggatacacagctagtgacccaacaagctcaaatatgtttgatttaaaaattttgacttttccactgttgacattgttgacataacagctaaatctgagtctcagggttgataatttagaataaatcaagacaagtactattgaggcaggctaggtagtcaagaaagtgacgatgtcctcgggatgcagcaaccacagcaattgcatgctgactgcatattgtcaacacgataagccccagcatttacactgtatttcagccattcaagcaaagctctcttcagtagggaaattcccctgtagagaacatgcacattttgattttacttgtcctctaactgaccttttactcattataatagtaaaaaataaacacgtgtgtgaagatttaagatgttaatgagatatgtgacatataagcatgtacagccactgtgtctgtgcaccaaaaggaccacccagaacatgcttactaacacctcttcccgtctccttgtaaataattacgtaagactcccataactgagtctccctagttccagtctttgctgtctcattcttacagcagcctgccctgaattcctcctctctcagcgagtactggctattctttacctaacttttaaaatagtatttctactttgcaataaatcactctatgctgcatcttcattgttttgtgtctcttgtttaaattttttgaaagtgagaagaatcgaggtctcacacagccatcaacactatcatgctttgttttgtattctttattatttctttctctgatatgtcaccattcatattttaaacccagacaacgctgctaaattaaaaatttaaataatcacaaaatgatttgtcataaaagcatgtatatggctgggtgcggtggctcacgcctgtaatcccagcactttgggaggccaaggcgggcagatcacctgaggtcaggagtttgagaccagcctgaccaacatggagaaaccccatctctactaaaaatacaaaattagccaggtgtagtggcgtatgcctgtaatcccagctactcaggaggctgaggcaggagaattgtttgaacccaagaggcggagcttgtggcgagcctagattgtgccattgcactccagcctgggcaataagagcgaaagtccatctaaaaaaaaaaaaacagttaaaatgcctttgaagagtgaaaataaaggatagattaagcagagaatttgacatggaaaaaggctggtcaattgtttgaaaattacattgcggctgggtgcagtggcttatgcttgtaatcccagcactttgagaggtcgaggcaggcacatcacctaaggtcaggagttgaagaccagcctggccaacatggcaaaaccctgtctctactaaaaatataaaatttagctgggtgtggtggtgggcacctgtaatcccagctattcgggaggctgggtgcgtggcaggtgtgtgacaccatgactagctaattttttttaattttattttttgtattttcagtagagatgagtttccaccatgttggccaggctggtcttgaactcctgacctcaagtgatccgcccatctcagcctcccaaagtgttgggattataggcgtgagccaccatgcccagcatattttttccaaattttctagtttgcatgcatagaggtgttcatagtagtctctgacaattttttgcatttatgtaggattagttgtgatttcacatctctaatatttaaatagatgcagagaacaacagaaaaaaaaaacagatgcagaataaaagtttgacaaaagttgacattcccttatgataaatctctgaaaaatttaggtatagaacaaatgcacctcagccaataaatgccacatataaccaaaaaaatgcacagctaacaacatactaaacggggatatattgtaaacttttactctaaaagctaaaacaagacaaggatgcccactctaatcagtcttactaaacatagtactaaatgcccatgacaaagaaattagagaataaaatcaaagacatccaggttaagaagaaattacattatccctatataattatcttttatctctgtacataatctgaagtatagaacagccgaagattttactgaaaaatattaaaataaacacatttattaaactttcagaatacaaaagcaacatccaaaagtcagtagcatttatgtacactaacaaatatctcaaaatgaaattaaaaaataattccatctacaaaaactgtagtaactatattttgaaaaaaacttaaccaaaaagttgaaacaccttatattatactgtaaacagcattacataaattgagtaatgcgcaaatgaaatactactcatttatgaattgcattaataaatttctatatcacacaaattgatctacagatataatgcaacccctatcaaaataccagtggcatactgcatagaaaatttaatttatatggtaccacaaaagaccctgaatagccaaagcaatcaagaaaaaaaagtaaaggtattaccataccttcaaaatattctacaaggcaatagtaactaaaacagtatggtacttgaataaaaacagacacataggccaatgcagtagaaaaaaagagaccagaaatatatccatgtatttacagctaagtgatttggaataaagctgacaatttctttttttatttttgagatggactcttgttctgttgctaggctggagtgcagtggcacgatctcggctcactgcaacctctgccatctgggttcaggtgattcccctgcctcagcctcctgagtagctgggactacaggcgcgtgccaccacacctggctacttttttgtattttattagagatggggcttcaccatgttggccaagatggtctcgatctcctgacctcatgatccaccctccttagccttccaaagggctgggattacaggcatgagccaaaagaacagtaacttcaataaatgatgttgagaaaactttatgtccacaggcagagaaataaaatgagaccctcatctcacaccgtatataaaaaccatttcaaaataaattagacgcttaaatgtaaggcttgagatgagcctggtggctcacacctgtaatcctaccactttgggaggtggaggcaggcagattacctgaggtcagttgttccagaccagcctggccaaggtagtggaaccccatttctactaaatatacaaaattagctcggtgtggttgcaggcgcctgtaatcccagctattcgggaggctgaggcagaagaatcacttgaacccgggaggtgaaggttgcagtgagctgagatcgtgcaccattgcactccagcctgggcagcaagagtgacactccatctcaaaagtaataataacaaataaatgtaaggcctgaaactctgaaactgctacagaaaaatagaatgaaagccccttagactgttctgggcagtaagttggttttttgtttatttttttttttgagacggagtctcactcggtcacccagcctggagtgcagtggcatgatctcggctcattgcaacctctgcctcccgagttcaagtgattcttctgcctcagcatcccaagtagctgggattacaggcacccaccaccacacccggctaatttttgtatttttagtagagatggggtttcaccatgttggccaggctggtcttgaactcctgacctcaggtgatccacccacctcagcctctcaaagtgctgggattacagacgtgaaccaccgtgtctggtcagtttttttttttttttttatttaacctcaaaatcttaggaaataaaaggaaaaatagatgagtcagatgacttcatattaaaaagctgctgcacagaatctgatacaatcaacaggatgagacaactaaaaaaatgaaagaaaatattcgcaaattacatgtgacaaggagttaataccaaaagtatgtaagaaactttgctgggtgcggtggctcacacttgtaatcccagcatttggggaggctgaggtgggcagatcacctgaggtcaggagttccagaccagcctggccaacatggtgaaaccccgtctctactaaaaatacaaaaattagccaggcgtggtggcacgtgactgtaatcccagatactagggagcctgaggcaagagaattgcttgaacccaggaggtggaggttgtagtgagctgtgatcataccactgcactccagctggggcgacagagcaagagtcagtctcaaagaaaaaaaactacatatatatgtatatatatatatataaataaatatatgtataatatatatgaaactcaattaactatacaacaaaaacaagtaactcttaaaatgagcaaaaggcttaaataattttcaagaaaagacatacttatggccaacagatatatttaaatatgcccagtgttaagtacgatcagggaaaggcaagccaaaaacaactatgagatatcaattcactcctgttagaatgactcttattaaaatgaaaaagaaaaaaatgttatgaaagatgagaaggcattgcgtggacactgttggtttgaatgtaaatgaagacggccgttaggaaaacaaaatagagatttctcaaaaaacttaaaatcaaactaccatgtaatacagctgttgcactattgggtatatttccaaaacaaatgaaatcagaatgaagaaacacttacacttctatgttgtttgcagcactcttcacaatagccaaaatatagaatcaacagttcaggctgggtgtggtggctcacacctgtaattccagcactttgggaggacaaggcaggcggatcacttggggtcataagttcgagaccagactggccaacatggcgaaaccctgtctctactaaaaatataaaaattagccaggcatggtgacgggcacctgtaatcccagccactctggaggctgagttgggagaatcacttaaacccaggaggtggaggttgcagtgagccaggattgctccactgcactccagccagggtgacaagagtgagacttcataaaaaaaaaaaaaaaaaaaatcaacagttcagcatctaatgagtaaagaaagacaatgtggtagatatatacagtggaatactatttaaaaaagaatttttttgagaccaagtctctgtctatacaatctcggctcactgcaacctccacatccctggttcaagggattctcatgcctcagcatccagagtagctgagattacaggtgtgcaccaccatgcccagttaattttttgttgtatttttagtaaagatggggtttcttcatgttgcccaggctggtttcaaactcctgggctcatgcaatgcaccttggccttccagaatgctgggattacaggtgtgagccaccacacctggcctttaaaaaaaaattcattatttttaatcacatggattaagctggagaacattaattgagataaggttaatagttcatgatttcacttacacatggattccaaaaaacataacctcattgatgtaaaatggtgaccatcagaggccaatgtatttagaatgggctgggcacggtggctcacgcctgtaatcccccagcactttgggaggctcatcacgaggtcaggaggagaccatcctggccaatatagtgaaatcccgtctttactaaaaacacaaaaattagctgagtgtggtggcacatgcctgtaatcccagctacttgggaggctgaggcaggagaatcacttgaactggggaggcagagattgcagtgagccaagattgtgtcactacactccagctggtgacagagtgagactgtctcaaaaaagaaaaagaaaaaagagggttggaatgatatctgtcaaataatacatagagttgaatagaagaaataagttcaagagatttttttgtacagcatggtgactatagctcatgtttttgtatttttgaaaagtggtaagacaatgtcatgtggtctcaccacaaaaacgttaactatgtgaagtattagttacctagaactaatcacctgacaatgtatatacacttcaaaatattatgttctacagaaaaagtacacattttatctgtcaagttaagtttttaaagctttatagaaggataacaatgtgtcaaatactgtccatgtttttgtcataatcttggttgaatagtatcaaaatatatagtttttgtttttggttgaatagtatcaagatatatagtttttgtgtttttatcatttaatttgtcagtcataaccgtaggaactccgatatttaacagtatgttctggacccagcacattgcatggaagaagcttatgtcctttaggatttttactttaagctccgggcacctggagtttctggtgctgatggtaatggtatgaaagacactcaaagagcaggtgttgcttatggtcccatgactggccactctgtgaacacagtaaactagtttgcatgcaaagtaacagaaaatgttttaatccaaatgctgtcatgatgcccaaaatttatccagaaaaaatgactaaggagttgcctgcatttcagggacagaaaataaaaactgtagactaaacttcacccacttaaaaaattatatgagaaattcctccaaattgtaatatcaatatggaaaagcaatattcttttaagtttcaaattcacagagctcattattttgtagcctttagcattcacttaaaaattatatgtgttatcctcccgtctccctctccctctcccgtctccctctccctctcccgtctccctctccctctcccgtctccctctccctctcccgtctccctctccctctcccgtctccctctccctctcccgtctccctctccctctcatgccgagccaaagctggacggtactgctgccatctcggctcactgcaacctccctgcctgattctcctgcctcagcctgccgagtgcctgcgattgcaggcgcgcgccgccacgcctgactggttttcgtttttttttggtggagatggggtttcgctgtgttggccgggctggtctccagctcctaaccgcgagtgatccgccagcctcggcctcccgaggtgccgggattgcagatggagtctcgttcactcagtgctcaatggtgcccaggctggagtgcagtggcgtgatctcggctcgctacaaccacctcccagccgcctgccttggcctcccaaagagccgagattgcagcctctgcccggccgccaccccgtctgggaagtgaggagcgtctctgcttggccacccatcgtctgggatatgaggagcccctctgcctggctgcccagtgtggaaagtgaggagcgtctctgcccggccgccatcccatctaggaagcgagaagcgcctcttccccgccgccatcccatctaggaagtgaggagcgtctctgcccggccgcccatcgtctgagatgtggggagcacctctgccccaccgccctgtctgggatgtgaggagcgcctctgctgggccgcaaccctgtctgggaggtgaggagtgtctctgcccggccgctccgtctgagaagtgaggaaaccctctgcctggcaaccgccccgtctgagaagtgaggagcccctccgtctggcaaccaccccgtctgggaagtgaggagcgtctccgcccggcagccaccccgtccgggagggaggtggggggggtcagccccccgcccggccagccgccccgtccgggaggtgaggggctcctctgcccggccgcccctactgggaagtgaggagcccctctgcccggccagtcgccccgtccgggagggaggcgggggggggggggtcggccagccgccccggccgggaggtgaggggctcctctgcccggccgcccctactgggaagtgaggagcccctctgcccggccagtcgccccgtccaggagggaggtgggggggtcaaccccccgcccggccagccgcccagtccgggagggaggtggagggtcagccccccgcctggccagccgccccgtccgggaggtgaggggcgcctctgcccggccgcccctactgggaagtgaggagcccctctgcccggccagccgccccgcccaggagggaggtgggggggtcagccccccgcctggccagccgccccatccgggagggaggtgggggggtcagccccccacccggccagccgccccgtccaggaggggggagggggggtcagccccccgcccggccagccgccccgtccgggagggaggtggggggggtcagccccccgcccggccagccgccccgtccgggagggaggtggggggatcagccccctgcctggccagccgccccgtccgggaggtgaggggcgcctctgcccggccgcccctactgggaagtgaggacccctctgcccggccagccgccccgtccgggagggaggtggggggaacagccccccccccggccagccgccctatccaggaggtgaggggcgcctctgcctggccgcccctactgggaagtgaggagcccctctgcctggccagccgccccgtccgggagggcggtgggggggtcagccccccgcccggccagccgccccatctgggaggtgaggggcacttctgccgggccgcccctactgggaagtgaggagcccctctgcccggccacgaccccgtctgggaggtgtgcccagcggctcattggggatgggccatgatgacaatggcggttttgtggaatagaaaggcgggaagggtggggaaaaaattgagaaatcggatggttgccgggtctgtgtggatagaagtagacatgggagacattttgttctgtactaagaaaaattcttctgccttgggatcctgttgatctgtgaccttatccccaaccctgtgctctctgaaacatgtgctgtgtccactcagggttaaatggattaagggcggtgcaagatgtgctttgttaaacagatgcttgaaggcagcatgctcgttaagagtcatcaccactccctaatcttaagtacccagggacacaaacactgcggaaggccgcagggtcctctgcctaggaaaaccagagacctttgttcacttgtttatctgctgaccttccctccactattgtcctatgaccctgccaaatccccctctgcgagaaacacccaagaatgatcaataaaaataaaaaaaaaaaaaaaaaaaaaaaattattattaaatgtgagaaaaaaaaaaattatgttatacttttattatataagtatatattttaataaaagtatgttacataataaaaaataaatttaaaattgttcacttaccattaactcttaaaaatttaatttctacattttcttgcaaattttatgtttgccacactttaagaatctaattttttttttaacaaagaacaactattctgatttaatcttctcacctgtggacaatgtatgcttttatcttaactaatccgaaagttatattgataaccaaactctccagttaaaaacaattattcagtgcattaaaaaataccaactttcagctgggtgcagtggcttatgcctgtaatccaagcactttgggaggctgaggcaggtggatcatatgaggtcaggagtttgaaaccagcctggccaacatggtgaaacttcgtctctacaaaaaattaaaaaaaaaaaaattcagccagatgtggtggcaggtgcctgtaatcccagctacttgggaggctgaggcaggataattgcttgaacctggaaggcagaggttgcagtgagcccacattgcaccactgcactccagcttgggcaacaagagtgagactctgtctcaaaaaaaaaaaaaaaaaaaaaaacaaccaactttctcgtcaaaatttacaaagtaccatgtgaaatgaaatggcattaagacaacagtgagaaaactgaagccataacacagaaaaaggagatgggctgtgctgcatacatagctggggatacacataataaatacagagaaatctgaagataattaagaaataaaagatgcagaacttctctttaaattcagcaagattcagcattgcagcctggaaactatgtcctctccacatgaagaatcaattttatttcttcaccactgatgttttccatctctgaactgaagttacaagctaactttagcaggaatacttatggcttactatggagcatctgttacacagcaagaactgtcatgtatgtttgctacatttaaatataaaaacatcctcacgacttataaagcttccctagtacttacctgaacaaattgactcaataaataaatttacttatgtcaactataaaaagtgaaaagaaaaataactaaagggctatagagttctccaactaaaaacaaaatgaagtgttctaactaaataaaatgtaacttaatacactaattgtggaattacatttaaaaattttgtatgcactaaattttgtaaaaattattcttataatcacagaccagctcacataatgaatacttcataatctgtaaaatatttatatgaaaaaagatacaaaataattaggggtctatcatgagtaccaggcaagtataaacagaattttcatggggagattcagaactataagccacagaatgtacagtaataaattcaatacaaagcagagaatacattttcttttagcatttttgaggcttttagttttctagtagtcatcttgttaaaatgatttgttttgttcagtattgcttttttcttcggaaaacaggtacaaattcatacacacaaactcactctataattttcttacacttaaggtttatctttagactaacatatatttaactatatgtaaatcaaaactaaatgtctgcatgtgtttgcaggcagacaggaaacatgctcaaaaaataaatattagaaaactttaaaaatacttattcaggcctcagaaatgtagggattttattatacttctacataacttttattatgaccataaaaataacactgtaatcaataacaatttaattttacattttaaaataactaaaagtataaaactgggttgcttgtaatacaaaggataaatactagaggtgatggatacctcatttaccctgatgtgattattatatactgtattcttgtatcaaaatatgccatatattgcatgaatatatactcatattatgtaccccaaataattaagaaaaataaatttaaataaaataaacatttggctgggcacggtggctcatgcctgtaatcccagaactttgggaagccgaggcaggcaaatcatttaaggtcaggagttcgagaccagcttgacttacattatgaaaccctgtctctactaaaatacaaaaattagctgggcatggtggtgggtgcctgtaatcccagctacttaggaggctgaggcaggagaattgcgtgaacccaggaggtggaggttacagtgagccgagatcgtgccactgcactccagcctgggtgacagagcaagactacctctcaaaaataaaataaaataaaaacaaaaatttaacctacagaaataatattctttaacttatttgcagtcaaagccactagcaaaagagattactagagatgttaatccattatgttaccaaatagtatactgttaccatgttttacgtacacccttgagtaaggtggaataggttaatgtctgtggcataataacacttcactgaatgcacaatagtatttaacatgttaaaaaggttgaatatattaacatcacatataatctgaaatttaaaaaatatactgcattttatataaaagtattagtaaaatatactaattttaatttacttataaatgaaattaagttttctcataatgcagaatattactctgaatgcctaacgcacacattgcttaatattataagttaaccataaaagtctcttcacttagattttcatcatacatctcatattttaatgtctttttcatagcaaagtttataaataatgctcacctaataaaaaagaatctctcatatctgatgcagcaacaattgatcacatgctttcacatgtaaataggagtgaagaaaaggcaggaaataatttaagagttgaattacattattactcacttttcaaaaaatctaattttttcaaaaagttaagcatactttgaatgcaataactgcaaaaaatttctacttttaaagttatatacaaatattttaccaattttagttttagattattttctatactcagcactctgatttagtaaaatacctgaagcatcagtgccttacatatttctactgtaaattctctgatatttacagacttaatgattaaaatttttaaaaaatttttcctgtatctgcaaaaatatgttttagtatgaactctctggtgttttctaagctgtagtttttgaaaaagtatttttccaactttattacattcgcacagtttttttcaatataaattccctgatattgaacaaagtttgagcaactgcttcagaggtttcctctaatacaaaacgtgtacagtaagatctgtgatacaagtaaacatattacaattctactacaatgttcttcttcaaaatactcttcactttaaaagcttatattttcttaaagatattttgacagtagttgcacttatgtttttattgagtatgaactctctgatgttgagtaagatgtgagcatgtattaatggctttttcacagtctttatatttgtacaatatttctcaagtataaatgctttcctgtgaaggtgtgagcattagttaaaagttttgtcacactgttcacacatgtagaagttttctccagtataacttaccttacctacaatcaagtgtgacaaccatttaaaactttatcacattcttcacatttctaggatttctcaacactatgatttatgttttgaaaagtttgaggtgttttcaaagcactgtcacatctttctggtttgtagaatttctctctagtatgaattatcttatgtctgttaggaattgagaatttattaaaggctttgccatattcttcacagtcacaggagttccctccagtatgaatttttttatgtttagtaagagttgaggactggtaaaaggctttgccacatttttcacatttgtagggtttctctccagtatgagttattttgtttaataaggcttagggactggttaaagtctttaccacattcttcccatttgtaagatttctctccagtatgagttatcttatgtttagtaagggttgaggatcggttaaaagctttgccacattcctcacatttgtagggtttctctccagtatgaatcatcttatgtgcagttagttgtgaggaccggttaaaggctttgccacattcgtcacatttgtagggtttctctccagtatgaatcatcttatgggtagtaaggtttgaggactcattaaaagctttgccacattcttcacatttgtagggtttctctccagtatgaattctcttatgtttagtgagggctgaggaccagttaaagcctttgccgcattcttcacatttgtagaatttctctccagtatgacttgtcttatgtttagtaaggtatgagaatcggtaaaaagctttgccacattcttcacatttgtaaggtttctctccagcatgagttatcttatgtgtagtaagggttgaggactggttaaaggctttgccacattcttcacatttgtagggtttctctccagtatgaattatcctgtgtgtagtaaggtgtgaggaccggttaaaagctttgccacattctgtacatttgtagggtttcactccagtatgaattcttttatgtgtagtaaggtgtgaagaccggttaaaagctttcccacattcttcacatctgtatggtttctctccagtatgaattatcttatgtgtagtaaggtgtgaggaccggttaaatgctttcccacattcttcacatttgtagggtttctctccagtatgaattctcctgtgtgtagtaagggttgagaaccagttgaaggctttgccacaatctttacattggtaggaattctctgtaatatgaaatcttttatgttgagttaggtgtaaaagcatgcaaaatgatttttcacattttttacatttgaaaggtttctttctagtatgtcttatcttatgtctgtttgaatttgaaaatgtatgaaagacttttgcagatggatcacattgaaatatgttgctctgggtagttatcaaacactggtttaatttgttatcatgttctttgtgcactttacactcatccacacttttacagcctttttgtaactgtaaattgtcatgtccatattttccatattttttcagaatcgcttcttgaaaagaatctttaatgtcctgctctgcccaaaggtcttggggaaaatgagaacatataactgaaagaaataaaaataacaaattactttacttactagacacagatagtttacaaatctaacctctaatatacaaactacataaataagatggcataggaaaataccaaaggccctcattcctttatagacatataaatgtaaaaaaaaaaaaaccaaccaaattacatctgaaaaaaattataaatgagttaagtgtgtgaagtgcccctggtgagaacaatgcaaagagccacttagaagtaaaagtctgtacatttacccaacagagctctttctgctccccaatataacatactgtctttagaagtaaattgccaacttgtttttaatgacaagtaaaatactggcacatttatctttattacttgcttctaggagcctttccagacactggtttgtgtctctcttgaaatataatgctgaaagaaacggtggtatactttggagtgacagtcttaactttgctgagaccaaaggtaaatgtttcagcaacagagagactgctgtaccacagacagaaaacaggtgtagcacgtgattattattaagaagaaacatgaataaactcctttaactaaaagagaaagacaaaatctcagacaagacacattctaagaacatgtttgagagactcccagaatctctaaccaagacgattgttcagactatgccaggacaaagctacattataaagattgtgacaggtagccttttttaatgtccaaatttcaatcaaggattacaatgtatacaaaataaggcaatatggttccataaaaatataaaattttaaaaaagaaactataaaaaagatgtatacacaccgattttaaaaattgaaaataaattgaataatactcagtgagtgaaacaggaagacagagaactatagaaaatcagaaaaatgaagataagaacataaatatttagaatatcaaaaaaacaaattgtggaggtaataaatataaaaaagaatagctgaaaaatattgaaagaaacgatgtaaagatgaagaagctcaacaaacaaactaggaaacacacaaagatatttataacaaacacatatataagcacaatttcaaaagtcacagacaagagaaccttgggagctgcaagataaaagtgatgcgtcatttgccagcatagtcttatgagacagccagtgaattgtcaataaaaattttgcaggccagaagggaagtgtgtaataaagtcaaactcctgtaaaatacagcaatcaagtaagcataatactatcagcaaatctgtcctgccaaataaaaagaaaataactttcaaaagtaacaaaattctgaaaagtatattggaactccataaaccctacatacaaaatgtactgaaagcagttgcttctattgaaaataacatgattcaacaaaaacaacacagtcaaataaaaatacattactttcgggaggggggagggatagcattaggagaaatacctaatgtaaacgacgagttaatgggtgcagcacaccaacatggcacatgtatacatatgtaacaaacctgtacattgtgcacatgtaccctagaacttaaagtataataatgaaagaaaaaataaaaacaaaacaaaacaaaaacaaaaaacaacaaaaaaatacattactttctgggaaagattatatgcacatatatacttttacttctaagtatatgcacatacaccaaaatggaattccttagcattatcataatggtgcagaaaacatttttaattattctctaaaatttgaaagtgaaaatcagagaaatcattataaacatctgttaataaatatacaacataaaaagatataattagcaaaatcaatgacaaatttgaggggagaagtaatgagaaaaaaaatgtgcatgcaactgaagttcttttttaccagattgaaatatactgttatatcttttagaggtttacgtaatccccaaggtccaaaaaagaacatgtgtgtatagatacacaaaacaagaaagaagtaaaagcatatcaatataaaaataaaaagatacaaagacagagagaaaatgagtgaccaagatataagaatcaaataaaacaattaataaaataacattagtatgtctttctgtttcagaaaattatttaaatatatatgtttaactttccaatcaagagacatactttcaatagagacttatttaaatattttaaaaactgagatccaacttgcctttctacgacagtaagctgagatctattgattaaaaaaaaactgaaagtggcaagatggatgtagatattgcatgtaaatattaaccaaatgagagaagaggtcaaaataatattacataagctacatcttacgtgaaaaactttcatattttataaaatgtactgcaagtcaaaactgcaaagagacaaagaagggcattaaacaataatagattcatttactgataacctaagtgtgtgtgtgtgtgtgtgtgtgtgtgtgtgtgtatctcacattaaggttccaaatacataaagcaaatattgatagaactgaagaaacatctagacagcaatactatagtaggacatttcaataacttactttctgtaataaaaataaatcaaaacagaatatttgtaagtgaagagaggacgtgaaggcagtataaaacaattatttctaacagaggtatagagaagattcctcaacaatatcgggatacacatgcttctcaattgctcatacaacattctccttaatagaccacatgttaggccaaaaaagaagtcttaacacatttgttaagactgagattgtatggattatattacatgaacaaaatgggagtataaaacaataatagaaaaacaattaaacatttacaaatatatggaaattaacacactcttgagcatgctcctgttcaaagatagaaataatagatattttgaaaatgtccatacttttcaaagtaatctacagatttagtgcaatgttgttaaaaatttctcattgcatttttgagaaactagaaacaacaaccccaaaagtatataaaatgtcaagagacaataaagtacccaagagtcttcaaaaaaaagaaaatgttgaaggcattatagttcctgatttaaaagcacattgcaaagctacataattaaaacaagttggtatgagtataatggttaaaaagtagactaataaaatagaatgccacatctatagaaactttcacatatatgtttatatgaagagttattttcatatccataattattgcagcattttttaccaatagcaatgcaagtttctttcctttttctttccttttttttttattttttattttttgagatggagtcttgcactgttgcccaggctggagtgcagtggcatgatcttggctcactgcaacctccgcctcctgggttcaagtgattctcctgcctcagcctcctgagtagctgggactacaggtgtgtgccaccatgcctggctaatttttgtatttttagcagagacagcatttcaccatgttggccaggatggtctcgatctcttgaccttgatatccgcctgcctcagcctctcaaagtgctgggattacaggcatgagccaccgtgcccggcaatgcaactttctgtcaccaaattatccaatagatataatttgcaatataaaaatactggaatatcatccaggatttaaaaagcaggaaatattctaataactctaaaaataaagcttgatgacattatgcaaaataaaatgagctagccacaatgagacagagattgtatgagacacatgaagcagtcacattcttagaaatagaaaacaaagtggtgtttgcaaagtgccagaacatcagacaaattggttgttgtacattgagatttagctttgcaagataaaacattctaggggtatgctgcataacattatcaatataattaagaggaataaacagaatattaaaaaatatttgataatgggcctggtgccgggactcacatctgtaatcccagcactttgggaggccaaggtgggcggatcacaaggtcaggagttcgagaccagcctggccaacacagtgaggcaaaagaatcacttgaacccaggaggcggaggttgcagcgagccaagatcccgccactacaccccagtcttggcgacagagcgagactccgtctcaaaaaaaaaaaattgctaatattttatgtgttcaagtaaaaatgaacaattaataccaagaaagatacagttacaatagtttcaatattatcttcaaatcccaaagtgtttctcccacatagaagtaatgtagattcacaacagatattgaaattaggagaatttttataactggtcacctagccaagattgaacgaccatttacaacaaacctacacaacaaatatacaagtcataaaataaacagagatgatatttgtagaggcaaacaaacacagaggtaattatattggcagtagacatatggctgatttatatttgatttggctagacacagtcttaaattgtacagagttaaacactgtcatacacaatggcaatataaaataaaacaccaaaacacaagcaactggtgttaggtgtcataccttaaaatacataacacaatataaaatatatatatatataatatatgtaaaatatataacacaaaattaaaatatggaatgtaaaacgtattggatgccatcaagtagatcaatatattcatcaaatgaatcttagaagaatatagggaaaaagtaatacagaggtaacttgaagacaaaaaaggctgagaacttcccaaatttttatgtaacaaaaaaatttctaaccaatatttaattcaaaattattttacttcaaaaacaagataaaaataaggactttccaaaataaaaattcagggcatttattacaactaccacagtcctacataaaatgttacatggtggccaggcacagtggctcaggcctgtaattctacagctttaggaagccaaggcagatagatcacttgagaccagtagttcaagatcagccagagaaacatagtgaaactctgcatataaacaaaaagaaatgctaaaatgagtccattatgttgaagaacaaaatgatgccagaagtatcaaaaaaatgtataaatataaaactctctattaaatgtaaatacagacacatatagaatttttttactatcataatgatgcacataaaacccttacagttctttagatataaaaaacaagatataaatctgcataaatctgttaatagatacacaatgtaagataatatggtttttaatattaataacaaattggaaaatataacaacagaggttttgtacttaattgaaggtgtgatgagattaaaatacattgttttaactttaagatgttttatgtaatctgtttttcaatatggttacattatatttcaagatgattacattatacttctggaaagtatgcaaaacaaaataaaaaataatcaaagcaagtcacaacaaaattaaaacaaacaaaaattaaggtagtaacacaggaaatgagaaaagacatatctacaagaaacacataaaatagtaacaatgaggtgatttctgcagatcagcagacttagtctttccccctgctggctgaggaatctgggcagtccagatgtatggaatttctcccagtgaagcacacccccttcaccaagaagcagccagagtgccttgttaaatggttcctgaatcctgtgcatcctgactgagtgaggaccaccccaccaacaggcattgtaagacaacttataaagaagtattcccactgtcatcagctcagtgcccatctgggataaagcttacagatgaaggagcaggcagttctctctgctgttctacacactccactggtgacacctccaggtgtgggagaaacccaggcaaataggatctgaagtggatcccaagcaaatcacagcggccctacagaagacgggcctgactgttaaaggaaaaacagaaagcaaccacagcagcatcaacaaaaatgtccccacaaaaaccccatccaaaggtcagcagcctcaaagaccaaagctagataaactcatgacgatcagaagaatcaaccaaaaaatgctgaaaactcaaaaacccagagtgtctctactcctccaaataatcaaaacatatttccagcaagagcacagaaccgggagaagcctgagatggataaactgacagaagtaggcttcagaaggtgggtaataatgaacttcagtgagctaatgaagcatgttctaacccaatgcaaaaaagccaggaaccatgaaaaacattacaggagctgttaacccgaataaccagtttagagaggaacataaacgacctgatgcaactgaaaaacaacatgagaacctcacaatgcaaccacaagtatcagtaactgagtagaccaagcaggaaaaagaatttcagagcttgaagactatcttgctaaaataaggcagataagattgaaaaaataaaaataaaaaggaatgaaaaaaatcttcaagaactattggattatgtaaacagaccaaacttacaactgattgcagtacactaaagagagggaaagaatggaaccaagttggaaaacatacttcaggatatcatcgagaaaaacttttccaacctaacaagacaggccatcattcaaattcagaaaatccagaggaccccagtaagatactccatgagaagatcaacctcaagacacataattatcagattattcaagtttaaacttcaggaaaaaatgataaggacagccaaccggaaggccaggtcacccagaaagggaagcccatcagagtaaaagtggacctctaaaaagataccctacaagccagaagacattgggggccaatattcagcattcttaaaaaaaatgaatttctaacccagaatatcctgcaactaagcttcatagtgaaggagaaatgaaatcattttcagacaaacaaatgctgagggaattcatcaccactaggcctgctttgcaagagctcctgaaagaagcactaaatatgaaaagaagaaaccactaccagcaaatgcaaaacacattgaagtacaaagaccaatgacactacaaaacaactacgtcaacaggtctgcaaaataaccagctagcaccatgagaacaggatcaaattcacacataacaatattaaccttaaatttaaatggactgaatgctccaattaataccagaacttttggaggccgaggtgggtggatcatgaggtcaggagatcgagaccatcttagctaacacggtgaaaccccgtctctactaaaaatacaaaaaattagcagggcgtggtggtgggtgcctgtagtcccagctactcgggaggctgaggcaggagaatggcatgaaccccggaggcggagctggaagtgagccaagattgtgccactgcactccagactccagcctgggcgaccgtgtaagactctgtctcaaaaaaaaaaaaaaaaaaaaaggcacagaatggcaagctggttaaagagtcaactcactggtgtgctgtattcaagagacccatctcacatgcaacgacacacatagcctcaaaataaagggagaagaatttaccaagcaaataaaatcagaaaaaaagcagaggttgcaatcatagtttctgataaaacagactttaaaccaacaaagatcaaaaaagacaaggaaggacactacataatgctaaagggatcaattcaaggaacacccagatttgtttttattgctcgcttgattgattttttttgagacggagtcttactctgtcacccaggctggagtacagtggcatgatcttggctcactgcaagctctgcctcccgggttcacaccattctcctgcctcagcctcctgagcagctgggactacaggtgcccgccaccacattcggctagtattttgtatttttagtagagacggggtttcaccttgttagccaggatggtctcgatctcccgacctcatgatctgtcagcctcagcctccaaaagtgctggcattacaggcgtgagccaccatgcccggccttattgatttatttttttgagatggaatctcactctgttgcccatgctagagtgcaatggcgcgatcttggctcactgcaaccttcacttcgcaggttcaagtgattctcctgcctcagcttcctgagtaggtgggattacaggcaccaaccactatgcccagctaatttttgtatttttaatagagacagagtttcaccatgtctaggctggtctcaaactcctgacctcaggggatctgcctgccttggcctcccaaaatgctggcattacaggcatgagccacacatccagccagcactcagatttataaaacatacttagatacctacaaagagacttagactcccaaacaatgacagtgggagactttaacaccccactgccaatactagacagatctctgagagagaaaaataacaaggatattcaggacttggactcagctctaggtcaagtggacctgatagatatttacagaactcaccagccaaaaacacaatacacattcttctaattgccacatggcacttactctaaaattgattacataattggaagtaaaacattccttagcaaattcaaaagaaccaaaatcataacagtttctcagaccacagtgcaatcaaattagaactcaagagtaagaatctcactcaaaaccacacaactgcatggaaatttaacaacatactcctgaatgacttctgagtaaataataaaattaagtcagaaataaaaaaattctttgaaaccaatgagaacaaagagacaatataccagaatctctggaatgcagctaaagtagtgttaagggggaaaatatagcactaaatacccacatcaaaaagctagaaagatctcaaattgacttcctaacatcacaactaaaaggaaaagagaaccaagagcaaacaaaccccaaagccagcagaagacaaaaaataaccaggatcagagtggaaccataggagatagagacacaaaaaaaacccttcaaaaaaatcaatatatccaggagctgtttaaaaaaaataaaataaaagagatagaccactagctagattaataaagaaaagagagaagaatgaaatagacacaataaaaaatgataaagcagatatcagcactgaccctacattaatacaatcatcagggcttggcgtggtagatcatgcctgtaatcccagcactttgggagggtgaagtgggtggatcacctgaggtcaggacttctagagcagcctggccaacaaagtgaaaccctgtctctactaaaaataaaaaaataaaaaaaattagttgggcatggtggctggtgcttataatcccatctactcaggcggccgaggcaggagaattacttgaacccaggaggcggatgttgcagtgaaccgagattgcaccatcacactccagcctgggggacaagagtgagacttcattccaaaaataaaaaaaaagaagaaaaaaaaaaaaggaaatacaatcatcagaaaatactataaacaccactatgcacataaactggaaaatctagaagaaatggataaattactggacatctacaccctcccaagactgaaccaggaagaagttgaatccctgaatagaccaacaacaagttctgaaattgagacagtaataagtaggctgccaaccaaaagaagcccaggaccagatggatttacagctgaattctaccagaggtacaaagaagagctggcaccatttcttctgaaaccattttaaatgaaagaaaagtaggaactcctccctcattttataagatcagcatcattctgatatccaacctggcagagatataaaaacaacaacaacaaaaacttaaaaccaatatccctgataaatatcgatgcaggccgggcacagtggttcttgcctgtaatcccagcactttgagaggctgaggcgggcagatcagctgaggttaggagttcaagaccagcctggccaacatggtgaaaccccatctctattaaaaatacaaaaattatctgggtgtggtagcgcacgcctgtgatcccagctactcaggaaactgagtcaggggaactgcttgaacccaggaggtggaggttgcaatgagccgagatggtgccactgcagtccagcctgggcgatagagtgacactatgtcaaaaaaaaaaaaaaaaaaaaaaaaaaaaaaaaaaaaaaaaaactgatggagaatgagaaaactattttaaaattaatgtggaacccaaaaaggccccatatagccaagacaatcttaggcaaaaagaacaaagctggaggcatcatgctatccaacttcaaactatactacaaggctgtagtaaccaaaacagcctggcactggtataaaaacagacacatagacccatgaaacagaatagagaactcagaaataagactgcaaatctacaactgcctgatctttgaaaaacctgacaaaaacaagcaataaggaaagaactccctatttaataaatggttctgggagaactgactagtcatatacagagaatggaaactggatgtggtaagaaaaagagcaagtgtaaggtgaaaaagccaggttcaggccaggcgcagagactcacgcctgtaatccaagcactttgggaggtcgatgaggtcaggagttcgaaaccagcctgaccaacatggtgaaatcccatctctactaaaaaactacaaaaattagctgggcatggtggcgggtgcctatatcccagctacttgggaggctgaggcaagaaaattgcatgaatcagggaggtggaagttgcagtgagccgtgatggtaccattgcactccagcctagactacagagtgaaactccatctcaaaaaaataaaaaaggccaggttcttttaatgaaccagctctcatttgaattaatgaagtgtaaactttctgattatcaaaaggctggtgccaaggcatttatgagaaattcgtccccatgacctaaacacctccctaccaggttccacatccaacattggggattacatcgcagcatgaggtttgcagaacatgttcatccaaaccatatcacagacaaactaggcttaacagacatgtacaaaatttttcagttaaaagcaaaataatacacaatattcttatttgcacctgatgtattctgttagaacacataacaagtcttattgaagaatacgtagtggctgatacgcataatttcaacaatttggaagacaaaagtgagaggatcacttgggaccacaagtataagaccagtgtcagtaacatagtgagagcctgtccctagaaataatcaaaaaattagccaggcatggtagtgcatgtccatagtctcagctactcaggaggctgaggtgtaaagatcacttgagtcaagcaggctgaggttgcagtgagccaaaattatgacactatactccagcctgggtgacggagtatgatcatgtctgaaaatgacaacaacaaataaatttaagaagaccaaaatcatgcactgcatggtatctgaccaaaactgaataaaactaggaattaaaagcaaaagtaaaactggcaactccaacaatatctaaaaataaaacacatgggctgagtgcaatggctcacacctgtaatactaccattttgggaggctgaggcaagagacctgcttgagcacaggtgttggaaactagcctaggcaacataggctagtctctaataaataaactgtctctaataaataaaataaaataaaattaaattaaaacacattcttcaacatattcctgctcgagggtcaaaaattttaattttgttaagatgccaatacaacctacagaggtgaacaaattcagtacaatctctataaaaatctcaatagcacagttattacagaaatattctttaaaatttttaaatgtgattgtgaactataactaaccaaacacccatgaaaagaacaaacaggcattatacttcccgattttaaaacattaaaagctacaataacaaaaacagtatggtactgatacaaagacagataaacagatgaaagagcagaatagagagttcagaaatgaacccttgtgtatatgattaaatgatcttccacaaagctgccatgaacacaccatagagaaaagataatcatttcaaaaaatgttaagaactaaatgtcaacactgataaagttggatcatttccttgaaccgtatataaaaaatgttttcaataaaatacttacataaaaaaactaacgaatctcttagaacaaaatagaaaaaagtcatgacatgggtcttggcaccattttcttagatacaacattaaatgcatgagcaacaacagaaaaacagaaaaatttaactacacgctacttcaaaatttatccacattagaaaaaaaaaacattcaactgtgtaaaaatgcctcataagaaatgggtgaaaatatttgcaagtcacatgtgataagagttaatattcgggccaggtgcagtggttcacacctgtaatcccagcactttggaggctgaggtgggcggatcacctgaggtcaggagttgaagaccagcctgaccaaattacaaattaataatttgtagagaaacacgtaaaaataaaaatgaaaaatgaaatcacctcacatccattacaatggccactataaattttttaaagacgccaactctgttgatgatgcaatgaaaatgaaacctctgttgattgttggtagaaaacaaagttgcagtcattattttaaaatgttacatttctcaaataattaaaagtggaattattatcaaatacagcaactccattaatgaatctatattcaaaatatgcaacaaaagacctagaagacatatttgaacatctatgattattgtaccagtactcacaaaagtcaaaaggctgaggcaacccgggtgtctcttgatttatgaacacatcaaaaatgtaacatatacataaaatggaatattatacagacttaaagaagaaaatcttgtcaattttaagacaaactttgagaatattatgtcatctgaaataatccagaaacaaaatgatggacactgtatgattccacttatatgagatatcttaaatagtcacactcataaaaacagaaagtggaagggtgtttgtcaagggctggggagagggtaaaatgggttgttgttacttaatgggtatttagttttaatttcacaagatgtaaaatttctgtaagtcttttgcataacaatgtgaatatacttaacatggctaaaatgcaattattattattattattttttttgagacggtgttttgctcttgttgcccaggctgaagtgcaaggggcaatcttggctcactgcaacctctggctcccaggttcaaggaattcttctgcctcagcctcccgagtagctgggattacaggcacctgtcacaaggccccgctaatttttgtatttttagtagagatggggtttcaccatgttggtcaggctgctcttgaactcctgacctcaggtggtctgcccacctcagcatctcaaagtgctaggattacaggcatgagccaccacgcctggcatgtaaaactttttttttttttgagacagtctcactctgtcacccaagctggagtgcagtggcacaattatggctcacttcagcctcaaacttccaggctcaagtaattctcttctctcaaatttcccaagtagctgaaaccacttgtgcataccaccatgcctggcaattttttaaataattttgtggaaagggaatctccctgtgttgccctggctggtctcaaacttttgggctcaagtgatcctcctttcttgacctcccaaaatcctgggattacagctgtgaggcaccaccatgtctggccttgaaatgtacacttaaagaaatttaagatggtaggctgggcgcggtggcccatgctgtaatcccagcactctgggaggctgaggcagagcgatcacttgaggtcaggaattcaagactaacctggagaacatggtgaaactctgtctcttctaacaatagaaaaaattacccaggcgtggtggcgggcacctacattcccagctactcgggacgctgaggcaggagaattgcttgaacccaggaggtgggggttgcagtgagccgagattgcgctattgcactccagcctcggcgacagagcaagactctgtcccccacccaaaaaaaaaaaaaaaagatttaagatggtaaattttatgttacgtgtttttacaaccattaatttttctttttctttttttttttttttttttgagacagagaattgcttgaacccgggaggcagaggttgcagtgagctgagatcgcgctattgcactccagcctgggcaacaacagtgaaacgccgtctcaaaaaacaaaaaacaaaaaacaaaaaacaaaagttgaagaggtatttcctccatcaaattcacagacaccaatgcaaaactatattgtgcccattgtcaatgcttctattttaacgtaggactggaagtaagtggcagaatgatgagtcaaaaacatttttaaaaagccactgaaattgaagaaaaataagttactttttgtggatcatatgatcttatatataaaaaaaccataaacactacattgaaatttgtctaaagtaataaatacactcagtaaattagcaaaatataaaattaacatacaagtataaactactgttccatacattttaaccatctgatacaataaagaaaacaatcttatttacaatagcattaaaataataaatttctgagaggaaatttaaccaagaaggtaaaaaaaatctttacaataaaagatataagatagaccaggcacagtggctcacgactgtaatcccaacactttgggaggccggggcaggcagatcaagaggtcaacagatcacgatcatctggccaacatggtgaaaccccatctctactaaaaattaaaaaaattagcttggcgtggtggcatgtgcctgtagtcgcagctactcaggaggctgaggcaggaagattgcttgaacccaggaggtggaggttgcagtgaaccaagatcgcgccactgcactccaacttgatgacagagcgagactccgtctcaaaaaacaaaacaaaacaaaaaagatatatcaatgaaataaattattgaagacacaaattttaaaatatttcatgtccatggattgaaagaataaatattgttaaagtgtcatattatctaaagtaatctatagctccaataaacttcctattaaaattccagtggcatttttttccacagtaataaaaaatacaattctaaaatttataagaaactgcaataaacttcaaatagccaaagcaatcttgaggcaaaagaacaaagcagaggggtattatactttataagttctaactatatttcaagaatatagtaataaaaacaggatggaatgtgcaaaaagattaacaaacaaaacaacggaacagaaaacactactttcacacatttcagacatgatgaaaaaagagaactaaaaaatagtttaacatagagtttcccaaaattatgcagatatctgtgtgtccccccaaataatggaaaagtagggagattgtgcagtcttttatatgccttgaaaaggactctggctctcactgtaaacctgaaggaagatcaccaaaaggaaagtagaatctttaaagaatttaaaagcataagacagaagatgcccctacgtgacagccaaaaaaaaaaaaaaaaaaaaagcccaaaaaacaaaaacactcaggcatcccagaaactatttcctttggaacatagcttcccaaaccacattttaatgaccagctttctttttgacctttggacctcacatctgtgtcatctgttgtgttcactctcacctacctgggggtttggctaccatctcatgtctctttatattccagggctcttttccttgctccagacaggtgatcaggtctggcttagtgagagcaatacctgctttattagaaataaataacatgaatctttctcatattctccaattaccaacctagtactatgcttagtaaagaggaggtgatagaatattctagaaaattaatcctaacgtactaattaatgagagaaatttctaaatatttagaaaatattttaaatttgtaggttcttaatttcactacccggtactcatgaatcaaaaaattggtggtgatgaatggattttaaaatatgggcaaatatatatgtacatatatatacatttatttatttttgagacggagtctcgctctattgtccaggctggagtgaagtggcatgatctcggctcactacaacctccacctcctgggttcaagcaattctcctgcctcagcctcctgagtagctgggactacaggcgcctgccaccatgcccggctatttctgtatttttagtagaaatggggtttcactttgttggcaaggctggtctcaaactcctgacctcgtgacccgcctgcctcagcctcccaaagtgctggtattacaggagtgagccaccatgcccggcctaaaaacatgggcaacaatattttatgacactaaatttctggaattaccactaatctagagtgaaggatacagatcagctcaggaatatggaaagttcaggtcaagatgaaacatcttgaatacattcttttccacacacagcctcaagattttcttgaaaaaacggatcagaaactcatttatgcaaagcatgaattaccaaaaatcattccacaaaaaaagagaaacctttacggtatattagaaattgtgtattaaagttattctcacccaagaagaccaggtttctgtagttctctaacatcactttcctatacaaaccctgctgagcactgtccaggcattgccactcctccagagagaattctatggccacatccctaaacgtcaatggcccctgaaaagcacaagcacagagacacacatatatttaccaagtggccatgggcagaatttattatttgaattaaaatgaaatgacagagcaaagagaattggttctgattaatagaaatgacaaattttccaataatttttaacacagaaatattctctaaaatattctctaattctgagagaagagaatggcataagatccacaacaccagtgtatatatgacacttttctagataaagtataaaattaagagcataaacacaaacatatacatttttgagtgttattatttatatcataaagaatgagttgtgtatatttttcagacaaaaaagagatgttgagttagaaggcacctcctgaattttaatgtttacaataaactggaaatcttgtgcagattttttttcagaagatctggaatgaagtctgagtttctgaatttctttcttttttttttttttctgagacggagtctcgctctgtcgcccaggccggactgcggactgcagtggcgcaatctcggctcactgcaagctccgcttcctgggttcacgccattctcctgcctcagcctcccgagtagctgggactacaggcgcccgccaccgcgcccggctaattttttgtatttttagtagagacggggtttcaccttgttagccaggatggtctcgatctcctgacctcatgatccacccgcctcggcctcccaaagtgctgggattacaggcgtgagccaccacgcccggccgagtttctgaatttctaacgagctcactagtaatgccaaagtttttggccccaaaagaaaattctgtgaaacatccagtaagtggaagagcctgtgttttaccagatttttctggcctgtaaaacaaagagccttcattttccaaagacagctacatgcaaagaaaacataagaaaaaagggcagctgccagattaaatgtgatggcttatgcacattaactgcataaagatgcctaataatgacaagaaaaatagttaactctgtagtgaaagaaatatcagagagctttttaaccaagtaaattattaatatcaaccatagtaggacgaatttttatgttgtgcttatgcacatagaagaacatagcatcattgcctagatattgcccctccaaaagtaaattatattctgaattcaatcatacagaaacatcagttttatgcaaagttcaagatacaggtatctccaatgttctgtaattttcaataatgattttaagtagtctttcttcagcaccctatatagcaggtatctctcaatcttttttcagaactttctgggtaataaatgccatcctatttaagtaagtattttcttaatcctgttctgcatagagctaatggagaacacagatggaacctcaacattacatattctccacgtaaaccccagctttccccaataggaatcttgagtatccacatccttccatgttcaacagccacaatgggaacatttttaatagtgcagatcataaattcatggtaggaattctgcatggcatataagaagccatgatattgagaatgtagagaaggctctagtacataggaaagaaatattttgcatagacccttgactatcattagaattttaaaaagtagttaaactcattagtaaggaaaaacacaagtagagaagtaaaggtttgcaaatactaaatgcatgagactctagaaaagagtggacaaagctcttgatgtgagacttacttagctgaagaaaaaaaaacatcatttttcctctttctccttcttctcttggaatccttttcagatgaaattctctaaagaagtaacatctacatcttgagaaaactgccttaaatgtgtcagcaccaccttcttacctgctagcaccacgcccacagacagaaggaccaagaccaaaaagtccacccatacctctcccttataacagaggagattcaggaaaaatgtgctgctccatggatgtaaaaatgtaagtttctcctttcctgtctcaggtgccctcccctgccacaaacaccagcaatttctgctacagtaatgaacatatgggccacactgccctgtccctaccaaacccaaacagaacaggtatcgtaaccaccctttagtgcaaaggtggcacttaactctcatgaatgtatcttgaagccctcatacttcattctggcctcaccttagagtcacatgaggcacttcattaaaataacatggatgcttccacccacaacaataaacagaagctgtggggaaggcacaagagatttttgccaactggtcatgtgatcttaatgagaagcctgggctgataaccacttagctaagcattgcctctcaagctttaatgagctcaaaaatcacttggtaatgttggtcccactttatgtaatgtgattctgcatgtttggaaagggttcatgaatgggtgtttcaaacaagtcccctgccaatgctgatgttgctcccccaggctcatcattagcattagtgagagaaagcaggcaccgcacagagtccctgacattcagcactcttgtcacaacacaaatacttctggtacaaatgaagacaaccacactccatcctgaagttttatattatttgctggctctttaaagtttacagaggaaacaaaaggcagcaatgttggaataagtctgcatttggaaaacaacatgtacacatgtactaatgcaataattattaagcaggtactatgtgctcaagagtacaatatagagcactgtgctgggcataacatattatgtgatttaatccccataacacattggaagttgatactaagtgttcagtaattctcaggatttagataaagggcccagcattattacttcttcctctgtttctctgttattgattttttaaaaaaatgtacagaataaggctaaatatagacagaggagggggcatagaaagagtttaagaaatttttttctatttatatttacttgtctgtgacttgtggagcaactactggatctgcaagaatagaaaacaagctgctaaatggaatgtttctgtaagcactggttttaatacaaaatttaaaaaaataagatgttaaaatgtatagtttatttttcttatttatctgcttttgggttgcaggaaattgtaagcaccagctctagaaaggcagaaggatttaccggccaaaactctgacctttataaatcagttctgtaaggcaagactccaaagtgggccagacctaaagaaggccttcaaaaagggtgaatctgaacagaactggggcagggaaaggaccctatggagaattctgttctctgccactggagtatttccagttctgtttttcctaagcttacctaagaaaaacttaaatcctagagtttatgtaactttaatctatttttgccactgctctgtcaattttataactatactaacaggcaatttaaatgactcttttaaagttttctggaataatttcattagaagataagtatgtattctaacaaagtaaaagatacacaaataatactaacaactcttcagtccataaatatcccttcaggtgataacctcagaagacacaacaatataaaaagaagtgggcaaagtttttttgttttgttttgtttttgagatggagtttcattcttgtcacccaggctggagtgcaatggcacaatcttggctcaacgcaaactctacctcctgggttcaagtgattctcctgcctcagcctcccaagtagctggaattacaggcatgcaccacctcgcctagttaattttttgtatttttagcagagacagggtttctccatgttgttcaggctgatctcgaactcccaacctcaggtgatccgcctgcctcggcctcccaaagtgctgggattacaggcgtgagccactgctcccgactgaagaggccaaagttttgttttgctttgcacacatctattcaccgtaccaaccatatgatgtttaattcaaccgtgtatccagttgctagtctagagcaaaagtttctggatggtagggaccgtgactgcttcatctattttttgaatgaccttatgaaatggaagcaattagtttatcttttgagtcaccggacctcctctttgtgtttcaccaaagtaacagcaaactagagaaactctcatctgggtaccaaccaaagttatctcttgtatgagtatgaagggagaaaaaaaaaaaacagaatgactcatttctcttacaccgagacagaagcagaattaaccactcgtcagcctgaaacaattctgcactggacatcctcaaatgtctcaaagacatctaggtgattgtgagaaggttcttactgaccctgggctgatggcccagtgataagccaggctgagagagattcatgctgattctaaatagaaaatggaactgccttggtggagctccagaacctgcatcacctatcctgacttgctagcttttgggtaagaagaaggacaagaatactctactccagtatcatattttacaggtaggtatagttgtggtcatggctctggatactttgtggccttgatctctcactcttaagatgctcgtttacacttacagattctgtcatcaaattctatttatacctggagtctctcacataactgtagcaggtcactcactaaacaagatctgaaaagcttgaagagccacactctcaaatgggggcttcaagatttctacactgacatctcacaatacagaaaatgccttctgttggttttcagtacattctcaatccaaagtcttctggccctgtcttgtaaatcctaggcagaggccagaccttatgtgcagattctaggtgggatcaatctgactctgcatccttgggtgttacagcaaacagactacaatcaaaggagagctcccctcatagaggctgctctggcacattctaaataatatgtctaactaaaagaaaaaactgaggcaacatgaatataagtagagagttcatctgggccaagcttgaggactgtaaccttggagcaaaaatacatcttccaaagactgaacaaataagaaattgaatccctgaatagaccaataacaagtgccaaaactgaattggtcttaaatggccaccaatcacaaatagcaaagaaccagacaaatttacagattaattctaccagatgtacaaagaagagctggtaccacttctaatattatttcaaaatattgagaaaaagggacttctttttcagctcattatataaaaacagcatcattctgataccaaaactgggaagagacacaataaaaaaagaaaacttcagaccaatatccctgaggagcactgatgtgaaaaacctcaataaaacactggagaaccgaatccaggagcacatcaaaaaacttatccacctctatcaagtcggcttcatacctgggatgcaaggctggttcaacatatgtaaatcaataaatgtaatccatcacataaagagaacgaaagagaaaaacacataattatctccagatgagtcagcttggggaggcggaggcagcggcagcgcggcgagcgtgcagggaggccggagccctgcccggggcgggtcgcggggtgggcgggtgaactgccagcgaggaggcacctgcttgcgcgggtgcagcctgggctgcgccattgttgggggaggggcggctgctgagggcggcgagtagggggctagagaaggcgccagccccggcccagaggagcagagacgccccatggggaacacgctgacctattgcgtgtccccccagtaccagcctcaagctgggccggtgcgtggtgccagagctgtactgcgcaaccgacatctacgaggcggcacccggggatgcggtggcggtagcgcccgcttctgtggagcctaccagttggatttcgcagcgggcgagggccaccacctgcagcacatcagcgaccacgagatgccctaagatttagctttggagtcaaacccttctgaccatccaagggcaagcacaagtttcctgagcaaatctcaaaccgatgtgcgagacaagaggaagagcaaccacttaaatcatctatctccagggcagcttactaaaaagtatagctcatgctcaacaatatttctaggtgacagaacagtcagccagcctaaccttagaaccacagtaaaatgtgaccttagaaatatattaccacataaagaacagagatgcaaacagatccctggatatttttgatgagagatcacatcccctcacacgagaaaaagttccacaggaatagtttaagcatgatcctgagcacaaatttatttacagatttgttcatactctttttagtgctgcacagctaacagctgaatgtgcaacagtaactctggtttacttagaaaggcttttaacttatgctgaaatcgacatttgccccactaactagaaaaggattgttctgggagccactcttcttgcctccaaggtttgggatgatcaggctgtatggaatgtggactactgccagatcctcaaggacattacagttgaggacatgaatgaaatggaaaggcatttttcggagcttcttcagtttaatattaatgttcctgctagtgtttatgccaaacactaccttgaccatcgctccttagcagatgaccacctgaattttctatttgctcctcttagcaaagaaagagcacagaacctagaggctatttctagattatgtgaagacaaagacttgtgtggagcagctgtaagaaggtctttcagcgctgatcaacttcattggtattcagcactctaaagccatcctctcttaaagggagaaatgaggggttataatgtcacgggaccttcatctacaaagactggagaaataccacctttcctgctcaaaaaccagcaaaattagtgttttcatcaaaaggaaagatctcaaattcaagagacgcacggacaacaaggatcatactccatagaaaagaatgggaccttgtcaatgcaacaaaacactcttctgtcctttttaatgtaaacagagtcaccaaaaccactccaaagtgaaggctcccatcccacacacagatatttgcttacaatgtgggccagtaactgaactatgttaggttttttaaacaatagtttaaatttttagactttaaagacattaaccatataacttttatgtttcttccagtttttctccccctgctcattttgctgcatatgcctttagaatcaatgcagtattgcccttaaaacaagggactctaactaaagccacttaggagcagactgcagcattgttaggtattgaagggttcttcctccctactgttaccattaaagctgctagtcattggcaatcattttaaaccaaaaagctgatggataacatttgtcattcatattctttgcaagcattactttagcattttagcatgtctgcggtcataaacaaaggaagtatcagttatgatatctacttctattggggtccatgttgcatttcttgtgaactataaatggtacttctcattttctgataatttttatcttattaaataaatgtattaaaagatattttcataatgccaatgaacatggtggttcagtgacagtgaaaaaaaagtaaagcagttttaagctttaatatagtttgggccctccaaggtactgcagcaggagtataaatgctataaacctttgaaaaacatcatttgagagttttgttttttttctttaagagatgggggtcttgctgtgttgtccaggctggagtatggtggctgttcaccagtgcagtcatggtgcactgcagcctagaacttcctggcttcgcgccatcctctagcctcggccacacgagtggctgggactgcaggcgcaccctgcatttgtctcctgaatgttaggcttttgattttttgtttcagtcactcttgaagtcactcttgactgaagcaaaaaattaaaagctttatattcaaaattctcaaaatgaagctgggtgtggtggtgcacacctgaggttccagctacttgggtggctggaggattgcttggggtcaggtattggaggctgcagtgtatcgtgatggtgcctatagaaatagctactgcacttcaacctggacaacatatcgggaccccatctcttagaaaaatgcaaaattaaatgcaaaagaaatgcaccgggcatagtgattcatgcctataatctcagtactttgggaggctgaggtgggaggattacttgagcgcagcagttcaagaccagtctagtcaacacagtgagcccctgtctgtaaaaaataataataaataaaaataattagctggatatggtggcgtatgtctgtagtcccagctactctggaggctgaggtgggaggatcacttgagcctgcggggtcaaggctgcagtgggccatgatcatgctactgcactccagtctgggcgacatccagaccctatctcaaaagaaggaaaagaaaaacattcaggcaaggttttatgaaggtttgtagcacttctacaagtatcaaagcttaaaattacattaaacctttggaatatcttgtatctccataaaatgcccttctctttttaaaatgaattacttgcagagctgtgctctatatgcattgatcaccgaagtttctttaatttaaaggaagattttgaagagcactgttaattaacatgtaataaaaggaactgggccctaatgatagaaggtgatatgaacagctgttttatcatcctacatgctaccaacctgtaggtgtcccattaagtcctgctatttaagaaataacttacataacccttaggaacacttacttcaggctttaaaaggcaaggaacaaataattttaggagactgataatgccatctaaatttgaaaaactaaaaggagattagtgttctcaattatgtgaaatctatttctcctacttactcaaatctaatcctaggaatcttgcttataaacaaagcattcctgggccaggaatacttcctctactatagcaatatttcacatcatattgtgctgcaatttccatcatttttaaagggcagagaaataaatgataaataatggtataaaaatattacaatctaccacctcaaaaaaaaaacaacaaaacattgtttatggagttcagagcttggagagtcaagtattgatagctgttttattttaaaaagaatgttacaatttatgtggtttttatttctcatgtttatattaaaagttaataaactcttttaattaaaaacatatcattatttcaatagaaaaaagcctttgataaaattcagcatcccttcatgttaaaaaccaatggaacagaacagagacctcagaaataccaccacacatttacaaccatctgacctttgacaaacctgacaaaagcaatggggaaatgatcttctgttaagtaaatggtgctggggaaactggctagccatatgcagaaaactgaaactggaccccttccttacaaaattatacaaaaattaacttatacaaaaagtaactcaagatgggttaaacacttaaatgtttaaccataaaaaccctaaatgaaaacctaggcaataccattcaggacaaaggcatgggaaagacttcatgacaaaaacaccaaaaggaatcgcaacaaaagccaaaatttgacaaatgggatctaattaaagagcttctgcacagcaaaagaaaaccatcatcagaatgaacagacaacctacagaacaggagaaaatttttgcaacctacccatctgacaaaggtctaatatccagaatttataaggaacttatacaaatttaaaagaaagacaaccccatcaaaaagtgggcaaaacatgaacagatacttctcaaaagaagacatttatgtggccaacaaacatgaaaatacactcagccgagctcacgcctgtaatcccagcactttgggaggccgaggcggctggatcacctgaggtcgggagttcaagaccagcctggccaacatggagaaacccgtctctactaaaaatacaaacttagccaggcatggtggggcatgtaatcccagctactcgggaggctaaggcaggagattcgcttgaacccaggaggcagaggttgcagtgagccaagatcgcaccattgcactccagcctggccaatgagagtgaaagtccgtctcaagaaaaaagaaaaaaagaaaaaaaaaaaagctcaacatcactgatcatcagggaaatgcaaatcaaaaccacagtgagatacatctcacaccagtcagaatggtaatgattaaaaagtcaagaaacagatgccggtgaggctgtggagaaatagtaacacttttacactcttggtgggaaggcaaattagtctaaccattgtggaagacagtatggtcattcctcaaggatctagaccagaattaccatttgatccagcaatcccattactgggtatatacccaaaggaatataaaccattctactataaagacacatgcacatgtatgtttactgcagcactatttacaataacaaagacatggagccaacccaaatgcccatcaatgacagactggataaagaaaatgtggtacatataagccatggaatactatgcagccatcaaaaggaatgagatcatgtcctctgcaggaacatgaatgaagctggaagccagcatcctcagcaaactaacacaggaacagaaaacaaaacattgcatgttctcactcataagtgggagctgaacaatgagaacacatggacacagagagggaaactacacccacagggcctgttgaggggtgaatggtgaggagacagaacatagaggacgggtgaataggcgcaccaaaccaccatggcacacatacctatgtaacaaacctgcatgttctgcaagtgtatctccctgcttttttagaagaaattttttaaaagaggaaaaaaatgttacttatcacataaaccaaaactaaagacaaaaaccacatgattatttcaatagatgctaaaaaagccttcaatataatttactatccttcatgtttaaaaccctcaacaaactaggcattgaaggtacatacttcaaaataatgagtcatctttcacaaacttacagccaacatactaaatggacacaagtgagaagcattcctccttgaaaactggcacaagacaaggatgccttccctcaaaactcctgttcgacatagaattggtacagtctcagcagaaaagctctttaaactgaaaagcaagttctgcaaagtttcaggatactaaatcagtagcatctctgtacatcaacaacatccaagccaaaagccaaatcaaaaacataatgccattcacaattgccacacacacacacacacaaatatcgaggaatacagctacccaggaatgtgaaagatctctatgacaagatgatcaaacactgcttaaagaagtgagagatgacataaacaaatggaaaaccattttatgccatggatagaaaagattagcatcactaaaatgtcaaaactacccaaagaaatttactgacttaatgctattcctatcaaactaccaaaaacattgttaacagaactaaaacttaactattttaaaatttatatggaactaaaataagcctgaatagccaaggcaattttaagcaaaaagaacaaagctggaggtattacattaaccctcttcaaactacactacagggctacgataaccaaagcagcataatactgatgcaaaaagagatgcatagaaaaatgcaacacaatagagaggccagaaataatgccacacacctccaactatctgatctttgacaaagctgacaagaggaatgaggaaataattccctatttaataaatggtgctggaacaagctgggagaggtggctcacacctgtaattccagcactttgggaggccaaggtgggtgtggatcagttgaggtaaggagtgcgataccagcctggccaacgtggtgaaaccctgtctccactaaaaatacaaaaattagctgggcaaggtggcacatgcctataattctagcactttgggagcccaaggcaggtagatcacttgagatcaggagtttcaggccagcctggccaatactgcaaaacttcatctctactaaaaatacaagaattatcagggcatggtggtgcatgtctgtagttccagctactcaagaggctgaggcatgagaaatgcttcaacccatgaagcagaggttgcactgagccaagatatgccactgaactccagccttggtcacagagtgagaccctgtctcaaaggaaaaaaatagtcactaacagatactggcaaggttgcagagaaaagggaatgcttttatacactgttggtgcgagtgtaaattagttcaaccattgtgaaaagcagtgtggcgattcttcacagaactaaaaacagaattaccatcggacccagcaacctcttaactgggtatatattcaaagaaatataaattattctaccataaagtcacatgcacatgcatgttcatttcagcactgtttacaataacaaagacatggaataaacctaaatgcctatcagtggtagcctagattgaaaaaaatatggtatggtcagatgacagagctcattcttgtaatcccagcactttgggaggccaaggcaggtggattgccttagctcaagagttcaagacgagtctgggcagcatggcaaaaccccatctctacaaaaaataaaaataattaggcagacatggtagtgtgtgcctgtagtcccagttacttaatgggctgaggtaggaggaccccttgagccttggaggttgaggctgaagtgagccacaactgtactgcacttcagcctgtgtgacagagtgagacactgtcttaaaaaaaaataaagaaaagatttaatagaaacaaaatatggtacataagcaacatggaagactatgtggccataaaacaaacaccaccaagataaagatctctgcagcaacacggatggcgctggagaccattagccttagaaaactcatgcagaacacaaaaccaaatgcatgttatcatttgtaagagctaaataataagaacacatggacacgaggaacagtcacggggcctagctgagaatggaggatgaaaggacaaagaggatcagaaaaaaatacctctttggtgctatgcttagtacctcagtgacaaaataatctacaccaaacccccatgacacaattttacccatataacaaccctgcacatgtacacgtgtagaaaaagaaaatccatgggtggggaagaatgcagtgtaagtggattgtttgttctacagacagtggcccaggtggcgctgtactctgatttatttctgggtccatgcaggcagagaagattatgaacaggtagtccaggaccctaggctggtggagaaaacaggttgctgctgcagattcattgtctgggggttgggatatgccaggagacttgtggacacttttgtggctttttggcaagaaatactaggatccacaacgctgtagtgaaattcccaagtgtggtgactagtcctgggaggggtgtggacacgtcaatgtctagtgggtatgtttgtgagtggatcagaatcctgtggtgatagctgtggaacaagggggtctgtcatcagagttcctttcctctaagttttcatcctctcttaccctagaagatctggaatcacacgacaatgaaaggctttgttctcctttagacgagaacagagcctcccactccaagacaccaagagttccattccaggccaggtctccatgatatctttcttctaccaccaaaactgcagagtttgctgaataccaagcaattctctagcaccaactcaatgtctaacattcgaattctgacaccatgcagagtcagcaaagaccctgattcaaggtttagtctcataacattgccctctttgcagttgccagtcacaaaccccataggcccatctatgtttctgggctactgtttaaaaactgaggactcctgcgaccttcctcaagttcaataatttgatggagctactcacagaactcagcaaaacactgcagctatgtttacagattataaaagatacaacccaggaaaaatcaaatagaagaaatgtatagaacaaaaagaagaggtggggaaagatgaaacatatagataaccctggtaaatagctgtgattaataaaatttttcatcctctgtgttctccaggaacagtttatggaaagaaacactcttccattatgaattacacagtgctctcttttcttttttatcacatagccacagactattgaactagagcaactcgattttgaatatggctgagtaaaataaggctgcaaccactgggctacattcccagatggttaggcattctaagtcacaagatgagactggaggtcagcacaagatacaggtcataaagagctggctgataaaacagtttgcagtaaagaagtgggataaaacccaccaaaaccaagatggtgatgagagtgtcctgtggtcatcctcactgctacacccccaccggtgccatgacggtttacaaatgccatggaaacatcaggaagttacaccataatggtctaaacaggagaggcataaatattccacttcttgtttaccataaaattaagaaataaccataaaaatgggcaaccagcctatggagaaagccattctcttatatctccactttcttaataaatgtacaggccaggtgcagtggctcacgcctgtaatctcagcactttcggaggccgagatgggtggatcacctgaggttgggagttcgagaccagcctgaccaacatggagaaaccccatctctactaaaaatataaaattagctgggcgtggtggcacatacctgtaatcccagcaactcgggaggctgaggcaggagaattgcttgaacctgggaggcagaggttgcactgagccaagatcgagccattgtactctagcctgagcaaaatagtgagactccgtctcaaaaaaaaaaaaaaggaaattgctattattctaatatgactaagtgtatgttattaataattacactttgggaggctgaggctagcgagtcacctgaggtcaggagttcaagaccagcctgtccaacatggtgaaaccccgtctctattaaaaatacaaaacttagccctgcatgtgatggcaggtgcctgtaatcctagctagttgggaggctgaggcgggagaatcgcttgaacctgagaggcggaggttgcagtgagccaagattgcaccactacactccagcctaggggacaaagcaagactccatctaaaaaaaaataaaataaaataataataataattacattgttacctaaaatcattgtatgccacagagctaaccaaatttccttgtcaattttttttttactgtaactgccctaagactttgccatccagacaatcatcttgtgttgatcctcttcaaaagatgatttgtagtccactataagacaatgataggtgttcttaaatgcaagtttctgataacattagaaattgtgacattagaatagaggaagaactttcttgttttttttttttttttttttgagatggagtctcactctgtcgcccaggctggagtgcagtggtgcgatctcggctcactggaagttccactttgcagtttcatgccactctccttcctcagcctcccgagtagctgggactacaggtgcccgcaaccatgtcccactatttttttttgtatttttagtacagacagggtttcaccatgttagccaggatagtcttgatctcctgacttcgtgatctgcccgcttcagcctcccaaagtgctggcattacaggggtgagcaaccgtgcccggcctgaggaagaactttcaatactaatggagaactaaaatggtcatgactatcaaacagaacaggaattaactgagtggactgaactaatagaagactgaagtaatattttttgacttcgcctaaaacatcactgatcctttgttttgtttttcagagtcaaaaaaactattcttttgaactattcacaccttttaacaattgagtaaagtatacacctgtgaaaaaaatttggaaaatatttgtgagtattctgaacttaaaacaatttagttatttatataagtgcaataagaaactgttttcttttacaacaggacacaattagagaaacttgttattttaccaaggcttctgactagaatgacatactttgctttaatgaactaaacttgacttgtagaaccaataaagctccatgggaaaactggtattataccttgtctacacagcccctgtacagggttcctggctagcggtaaataaaaaaatttcttatctgagattccttttatgaaacaaggttccatcaaacccaatttaaaaggcctatgtgaaaaataattattcttgctacactttatagaaataatcgggccaagtataagactaaaactttttttttttatgttcacacttcacattgtcttatgtttatttgcagttatttttgaacttgaagatggcatatcttccagccatagcagttcacttcttcatgttaatttggtggctaacacaacaggtaatatccaccacccactcccaacctacatcctgctgatcttgctttgctcacatcttggagacaatagagttcacagagttgagtctgtggctagagccggtcagaaagcatgaatctgaaagatatttttaaaatagcactagtaggccaagcacagtggctcaccagcacttgggagaccaaggcaggcagatcacttgaggttaagagttagtgaaaatacaaaatcagctgggcatggtggtgtgcacttgtaatctcagctactcaggaggctgaggcaggagaatcacttgaacttgggaggcagaggttgcagtaagccaagatcatgccactgcactccagcctggggaacaaagcaagactatgcctcaaaaaaagaaaaaaaaatagcactcctaaacaaaacagtcacaaagcttagctttctctttctactactaacagtgtcataagatggattatgtaaaaatctggattactgtttgaattatgaagacatgacaatcagccacgacttcctatcagcttggttccaacaaatgcccagttcatgaaaagctttcttaagtttccttggaagaattttgcttattttgctttactgttgtagaatatattgccattctactccttgtgtagaaatgcagaataaacttactgggtgttttcttaaagtgaacacttattaatcttccagatatcacctattgttggaactgggagttaggaatggccgtcatcaaactgatgctttctgattgagctcctctctacctcaaatacaaaagacgctaataggcaagaatatcatcacctctattcagcatgaagtagtaacagaagattgatcttcgtcccactacaacccttaggattaagggtttccttgtttaaaaaaataacaataataatagagggggaaaatgtcagaggcatattgaaccaaagcaaatccattttgaatagggcctgggtaaaacagggctgagatctactggcctgcattcccagatagttaaccattctaagtcacaggatgagacaggagatcagcacaaaatacaggccataaagacctggctgataaaacaacttgcagtaaagaagtgagataaaaccctccaaaaccaagatggtgatgagtgtgacctctggtcatcctcactgctacactcccatcagtgctatgagagtttacatatgccatggaaacatcaggcagttaccctttagggtccaaaatggggaggcataaatactccaccccttgtttagcaaataatcaaaaaataaccataaaaatgggcaaccagcagtccttggggctgctctgcctgtagagtaaaccattcttttatttcttattaataaacttactttcactttatggactcaccttgattcttgagtgaaatccaaggaccctctcttggggtttggattgggacccttttcggtaaaatctctgcacatattttttctttttctcatgaaaaaaaattggctaaggctggcgtggtggctcatgcctgtaatcccagcactttgggagaccgaggtgggcagatcacaaggagattgagaccatcctggctaacatggtgaaaccccgtctctactaaaaacacaaaaattagctgggcatggtggcacgcacctgtattcccagctacttgggaggctgaggcaaaggaatcgcttgaacctgggaggcagaggttgcagtgagccgagattgcaccactgcacttcagcctggcgacagagtaagactccatcccggggggaaaaaaatcagctaaatttgtcttcagtggtctaagtaaaattttacgtgggctcctgaactttgagctaccctcaatctgagctaacttaaaacttcattctgtgcccctcctaagaacatgctgacttcagggtaaaacattctctaatctaaaatctaaccttttcaatctccaactgccattcccttcccaccttctctctaatcttttttgctccactgtatgaaagaaagccctcgtctgcctaaacttggcaattcttaaagtttttatagttggtattcctcctgttctaatacttttttggaattcaaattttttaaataaattgaacttggttatacattacaaagtctagaaactgccttaaaacaataacaacttcatcatcagcaagaccctcccaatccccttttatgttaaccttaactgcatctgcctgtgagcccccagctttccaggactctgtagcttctctcagcagataggcttcttccatggctgcagtgagaaggctgggacatctgcaggagagactccccagaaaaaactaacaaggccgttattaaatttcttctgcaggctcaatattagccttagctctgagtcactgggaccaagctctaatttccatgttaagagttattcacttggttgttgaaattaagtgtctgaaaaatccagcaaaatgcagtgttcatataagggaagggaattttaaggtgcttacattttatacctcaataagaaaagcaaaagtatcaggccgggcatggtggctcatgcttgtaattccagcacttcgggaggccaaggcgggcagatcgcgaggttaggagtttgagaccagcctgaccaacatagtgaaaccccgcctctactaaaagtacaaaaattagccgggcatagtggtgcgcctctaatcgcagctactcaggaggctgaggcaggagaatcacttgaacccgggaggcggaggttgcagtgagccaagatggtgccattgccctccagcctgggtgacagaaccagactccgtgtggggaaaaaaaaaaaaaagcaaaagtatctatttctttcagacaataaacgtattactttattaattccatttaaaattattttgtaaacaatgagtcatatgggagcacttctaaacagtaccgagtttcatctcataaaatttagcataaaactcaaaaatcaatgtaacaggatctgaacacagatattcactgtcacaaatttaccctgaaaaaaaagaaactgatgttttaatgaatctatgtaactcaccaattatccaccacattttcttgtggaaatgtattcattttccaaaactaaaattgagagattttgcctgggagcattctaaaagctaagccttgaaattctgtttgaaatcactcagccataaaaaaaacacacctgagaaaattcctaactcactctgggaaaaacagtaaatgagaatttttaacaaatttttgacaaatgaaatacatgatcagacatttttttctgaaacccacctctttcatgacctttgtaaatatttttctacctttcaagccctactaatataatgcaatttacagctaaaaaactgaggtcaaaataagtgacaaatatcttcaaggtgacaaacccaggtagtggcagtgctgattaaataacagatgtgtctgactcatgtttcaagtcaggtcattcaatcactggagagattcttccacccactcctgctcacttatgtgctcaagaaccacccactcagaagacactgcattatgccccagtgactgccccaggtgcattttactttgcaagctcttacaccatctcactggggtcagttctgttgttgtttgtcttttggaatactttttggtaacaaaattttcacttttttttccaatatttttctttatatttatttcactatttttctgccccccttagatgatccagggagcagaaattatttttgtgtttcccctcaataccagcatctgattggctgaccagcaacgtgtctccaagaaatgaaagctgggttgggtgaagacaattttaatgtctcaaggggttaccttttcaaaataagactgcaccagaagactcctctcagccccagggcatccacttgctcccttgagaggacacattccatacctcgggtcatcctacgggagaaaataaaccagaagctgacattcactaggcactttagctgacagaaccatggcggatatctcggtttatccacagatagtactgaaacccaggaccaggaaaaaactaaagggtggctgaggacacatcaccccatagatttttccaaatcaaaaccttgacccaaaaacattctgataaatctctgtgcctagagaaggtaaaaggaaaagagacacagagattttctacaatacagtgtcagaggattagtctttgtttccttttcgtgggaaatatttacaagcggataacacatcttcttaaaagcgccatttaatgctttgtcaaaaacaattaattaaaatatggtataaacaagtacactaaaggacaaataggtgataatgtgaattaggaaggaaaagttgacatttgggaacgccagaagaaattggaaatttagtatcttactgcaagccagagtgaggctggagaaatgggggacgggggttagacttaacaacctgcttgggacacaggtgaaaaatgcagcagaaaatcagttccccgtggagtgtgaaaataattaagagacaggcaattccactgaggtgtctctagtccctgggttcctacttaaaaaaaaaaaaaatctaactcaggtgcattttttttttaattactacattcagagaaaatgtaggcttaaacaactataaactgttaattaacctctgattacacaaccaggaaatcttcacctgtattgtacaaatcaagaaactacgttactgtaaccaattactaaatttagttttcttcatcatacattttataaatgactttccttcaagcctctcccatagacaacaaactacaaaccatagctggatactctatgattcttgaatcactgtttgattaaattctttaggccaggcgcggtggctcacgcctgtaatcccagcactttaggaggccaaggcgggcggatcacgaggtcaggagttcaagaccagcctggccaacgaggtgaaaccccgtcccaactaaaaatacaaaaaaataaggccggcccagtgacaggcgcctgtaatcccagttactcgggaggctgagccaggagaatctccagaacccgggaggcggaggttgcagtgaggggagatcgcgccactaaaccctagcctgggcgacagagcgactccgtctcaaacaaacaaaaaaatcgttaatatttgtgcagtgactcccatacatttttaataggagaaaagaggaactgggaaagccacggaccaaagatcttcccattcatgaacccgcaccccgagtcaggattttcccctgacgaccctcccgtggtccctgcacaatctgagagagacgcggcgctgcgggtgcagagctgccaagagagggctccaggccaaggcacagtcactacgcagggaagagaaaggacgcctggggtcctggctgtcagcgcagccgccatcttatggccgaaggggacggaggccgagctgggcaaggcgcagattgtgaagctgactgcggagaggcctgagtcccgccacagctacttcccaccagttccaaccagccctttcgccgtctctcgggatgtcggaccgggcactctcaccatttctaggcttctagggggtcctggcgtcttagctgtggatctcccaatatctgcaggtcagagggccacacaggctaggcccctaggagcagaagacacagagaagtgagagcaaaacctggagctccggctacagcgagagacaaagaccccgccaaacccggaagccgtccagtccgctccagctgcatgcctgattggacggtttccagcccagcgtccctggttggataatgcttaaatccccgccctgtcaggctttgagtgacagaagatgtgatcagatgcgggttcaatgaagaaagagtgacagcctagactgccccctcttctgacagggcttcctccctcagctgagctaggcccatcccagagagtatttgcctttaaatttgtgtataaggtcatatgtataaataaataatacattatatagctatacacaagtgaaaagaatataacaattattttaaaatttcagcttttatgaccttcctggcttctggccctttgagcaggcagcctgagattttagaaaagagaaaatcatctaaaatgaatgtcagccacatgtggatttgaaattttctagtagccaaactttaaaaagaaacaagttgaactgattgttaacaatgtaattcacccattatattcaaaatattatcattttaatgtgtgagaaatatgtaattattgataaaatatataaatatttggaactaaatctttgaagctgactttgtattttacctttctagcatatcgcatttcagaccaggcacattgtgggaacccagtagccacacatggacaatagctgtcacattgaagtgcagctctgatgtcagcggtgtgaagggcctgaacatctctttcctgcgagagtgaaagaagagactctccctacaaacatctctctttggttcctagggtggaccagatagttcccatagaaagagctgagggcagtaggaataaaatagccacaggtaataaacaactgctggccacctgttgcccacctttcttttagagaccagatagtgaacaaaggatgatggggccacaggagaaaaaacaactatgtcttcagttctgtccacacacttgaactccagtatttagagatggagaaaatagattaaaaacaaacatagtttgctatatggtcttggccctaacaatcaggctgtgtttatctgttttctcctgtggtgtgggggactatgtgagtctaagcaccaatcacacgcatacatgtctacaggtatttctgcattacccaaaattctcttacaaaacatcgaactttaaatcaggggaagaaatcagtacctagagggtgtccactgttagaagccaactcttagtcaacctgtcactgaatcctggcaacttatctgtactgggtgcatgtattagttagctattgaggcataacaaatcatccaaaacttattagtttataattgaaatggttggccatttaggccgagctgagtggggccattcttctggtctcagctgagctccttcagacatgtatcatcacctgctttttgactagacagctgtgcatctgggggtgagcttctgctcctgggtctgtcaacaggggcaccttgcttctcctcttcatggtatcttattttccagctggctaacatgggcattattcatggagatggcagcattctaaaagaaaaagagaagcagtcaataccatttgagcctgggccccaaactggcccactgtcatgttcacaggtttctgttgacctgagcaaataaggtcagccagatatagggctttgaaaacagattccagatcttgatggaaacagctgtaaaagcacctggttatgggcaaagatacaagagggatgaaaaaatgtcattttgcaatcagtatcattctaccttttttgcatatgtggtatatagaactcttccacatcaggaaacttgtgcaaagtcctacggctactaagtggctgggctgagactcaggatcaactttatctgactccaaagcccatgcacctccatagatgacactactaaagtagctgccctgccctagactattgaaatcctggagagtgacacttccatagtagaagtcagattccttttagatttgtgctcatttgggaataatcctcacaaaaattgcagaagcacacggtggctctcacctgtatttttagtactttgggaggctgatatgggagatttatgtgagcttaggagttccaatgcagcctgatcaacataataagattctgtttccatgacaaaaatgaagaaattagccacccatggtggtgcatgcctatagtcccagatacttaggtggccgaggcaggaggattgcttaagcctggaaagtcaaggctgcagtgagctatgagtagttacaccactgcaatcaagactgggtgacagagtgagtccctgtctcaaaaaaaaaaaaagaaagaaaaaaattggagaagcattttgaaaagatataaaataatttggggaaataactgaaggatgagtttagaaaatcaaagaccaacaacacattatttatttttcatcatagaaaatagttgaaatccattaaaaggaaaaatctttagagaaattaataaattttttaaatttattttttatttttgagatggagtctcgctctgtcacccaggctggagcacagcagtgcgatcttggctcactgcaacctcggcctccccagttcaagcgattctcctgcctcagccttctgagtacctggattataggcatccgccaccacgaccagctaatttttgtatttttagtagagacggggttttaccatgttggtcaggctgctctcgaattcctgacctcgtgatctgcccaccttgtcctcccaaagtgctgggattacaggcgtgagcagcagagtccaattgagcatggaatgatttgcagattgggtagcctgtggatccagagtaggcgcagagagactctagcacagccacatgatgaaaacagattgatagacagcaaaagcaaagtgacatacagaaaatgaaagtgaggtacagaaacagccagattgattacaggttgggatttgccttatttaatcatgatttgaacacttgatgttcttttattggcagaagcacagtggttggtacaataatgggttacagtctatttatatatccagttaggtttcagtttactatgtacaaaaaaacctagtgaccaaagttaaacaggaaagggtgcagctttagagataattaatttaacaatttctcccttttggtcacgttctcaattttgagagatagaccaaaactttagacattgatattactctgtcaccatcaaaagtgtacttatttagtctcaaatcccactatgaaatagcagaactgtgggttttaaaagtggaaacaaggacttcacgttatttgttttttagggttgcagtagaggggaccatcttgtatcgaaatctgctgtttccaaaataaaaataaaacctaccctgttttaagatctacctatttacttaaatttttaatttgattatttcacatttagcatgagtgactccatttactttgatttggtctgtttgggcctagtgcacaaggtcagtccagaataatggcctccaataattttgtttaaaaattttccaccttttggttaagttctcaaataggtcagagtgtgactaaaactcagggtcttagtgtcactctcagtttctattatttttggtttttgtttttatcagttcattcataggttatggtgtcctcatggtcacgtatgtatttgactttttgtggttccagttaaagagagactatttcacattctagagataactgcatgcaaacttcaataacttttgagagaatacagtgcagtagggagactactattttgactatctgggggtaataaccaaaagtttcaagtatgctttttagtcagggtcccatgaacccaccaactaaaattaaatagatcaaataattagctacataaatgttctcctcatttcaaacaagcagcctattcactaatctcctacaactgaatctctgtaatacctggtgaatttctctatgtgcaactataagtattagcaacttcacagatacttctctgtttatccagtaaataatctagagaaattctattatttaccacaattttactaagaaaaattaaagtctattgtgtaaccatagcctttacaatagaatttgctatagagccctattatggggaataaatttctttttttctttttttcttttttttttccgagacagagtctcactctgttgcccaggctggagtgcagtggcatgatctcagctcactgcaacctctgcctccaggttcaagcgattcttctgcctcagcctccccagtagctggcattacaggcacacgccaccacgccctactaatttttgtatttttagtagagatggggtttcaccatgtcggccaggctggtctcaaactcctgacctggtgatctgcctgcctcggcctcccaaagtgctgagattacaggcatgagacactgcgccagcatagggaataaatttttaaccattgcctcatttactctaaaccatgggggaaaaaaagacctaacaagtgatacccattaagaagagtactggcctcctggcaacactctgtaatctattctgaataagttctctttaacttataaggtaggttaagagcagtggacaaatattccatttttgatattatgaggcaacagatgtcctattaaaaattctcaccaggccgggtgcagtggctcacgcctgtaatctcagcactttgggaggctgaggcgggcagatcacgaggtcaggagatcgagaccatcacggccaacatggtgaaaccctgtctctactaaaaatacaaaacttagctgggtgtgatggcatgtgcctgtaatcccagctattcagcaggctgaggcaggagaatcatttgaaccatggagtcggaggttgcagtgagctgagatcacaccactgcactccagcctgggcaacagagtgagactccatctcaaaaaaaaaaaaaaatctctcccatattggcccttcgtcttttacctatcaaggcataagtttgcccatatagaaggttggctgcaaaatcattttcatgtaaaagtgtagctcatgaaggcacacaagtgaccccttttttatttctgtcatttggagagccataagaaaaaaacagtggactaagagtgtcgtaatagcagagatgtctttcttgatttttttatcttgttaaaaaaaaagctatctatgttaatgttaccatctgcttttgaggagaagcttccctgcttagctttactttaagatctccaatgggtatacaattgcaagtttggaggggcccttctgagtcatgagattatcaaaccaaggtttaaagtcctgaagtcttgctgcagtgtagatggcaggcagactcaatctctctggtttctaaattataaagggttttatagtattccatcagtaaaccattaaaagcattctttacctagtgaaaatatgctttgccgtaatgcattaaagctttgctgcatttagtcatattagacttcagtagcagaagatacatgaggttcttttatcaggtgcataagccttccaatgactattttacaatcgtcaacacattttttcactctcagttaacctgattgtcatcaatctgcaactacaaaagcaattctgtcaatttagttaactttgctcaatattactgtttctgtaataccttatttaacagttttataacatgtctagtaaaataagtatccctattattggagactttttaagaaatgtttcacgagcaaaacatatttcctaatattattttggctactgttataacatcaaactttttgcatgagaaaacttttttttttttttgagatggagttttgctcatgttgcccaggctagagtgcaatggcacgatctcggctcaccacaacctctgcctcctgggttcaagcgattctcctgcctcagtctcccaagtaactgggattgcaggtatgtgccaccatgccctgctaattttgtatttttagtagagacagggtttctccatgttggtcaggctggtcttgaactcccgacctcaggtgatccacccacctcggcctcccaaagtactgggattacaggcgtgagccaccatgcccggcctgagaaaacttttattctacagacatgaattaaaaatgacaattaaataaaatttctttcctttttttttttttttaaagcagaacctcgctctgtcacccaggctgcagtgcagtggcataatctcagctcactgcaacctctgcctcctgggttcaagcgattctcctgcctcagcctcctgagtagctgggattacaggtgggtgccaccatgtccagctattttgtatttttagtagagacagagtttcaccatgttggccaggctggtctcgaactcctgacctcaagagatctactcacctctgcctcccaaagtgctgggattacaggagtgagccactgcacccggcctaaaatttctttacaaatgtttaaatagcccattgggtagcagaaatgtacatgaagttttgattgtcttctcgggattctgtttgacaaaaaaaaaaaattggtcctaacctattttagtaattagaataatcaccaaacacacacacacacatacacacacacacactcaatttatatttagcttaatttattttttatctcttctgtgatgagtaattaaatgcagtgattttgatagaggaaactttaagaactcagaaataaacaagtggctgttggctgtctaggttctccatgagtccacacacaacattaaatttatgtcctcttcaatatctggtttgtttcttcaattcaggtgcatagcactgataactgagaagttatcatacataatttgacttgtaccacagagtttattcaaacggcatatctaaaacaattttagtactggctaatttagtataaaaatgtggtagagtattttcatgatgttcaattaatttttgttttgcctggattagtagtttcataagagtcattctcttcattagaattctcacaattcttacccagtctaaacagtttgattgtaaaattatcagaaacttgtactcaacttgtctgggtcctttccatcttttcataaaactatgctaaaattaattcattaactgtggaaataacttaaaatagttataaagaaacaaatgaaaaaattgattttatctgtgtcctacaataacctatcataataaccataattatgactaatagcatatactcagaaatttcatacaattttcaaataaatgctaatagcacttattaaaatataagttgaaggtcagacatcatttttaatgttatgatgccttccatgtaacttaacatatcaaataattctgatgattactcttctggatgttgcattagccctctgcagcatctaaaagttaagggtcaaagaaaagacaattattaagcggaaatttcattctggaaaacctgtcaaatatgtcaaagggttaaaacacttgaccagatatataaaaattggctctccctctccctctccctctccctctccctctccatcaccctgtccctctccccacggtctccctctccctctctttccacggtctccctctgatgccgagccaaagctggactgtactgctgccatctcggctcactgcaacctccctgcctgattctcctgcctcagcctgccgagtgcctgcgattgcaggcgcgcgccgccacacctgactgtttttcatatttttttggtggagacggggtttcgctgtgttggccgggctggtctccagctcctaaccgtgagtgatccgccagcctcggcctcccgaggtgccgggattgcagacggagtctcgttcactcagtgctcaatggtgcccaggctggggtgcagtggcatgatctcggctcgctacaacctccacctcccagccgcctgccttggcctcccaaagtgccgagattgcagcctctacccggccaccaccccgtctgggaagtgaggagcgtctctgcctggccgcccatcgtctgggatgtgaggagcccctctgcctggctgcccagtctggaaagtgaggagcatctctgcccggccgccatcctgtctaggaagtgaggaacgtctctgcccggccgcccatcgtctgggatgaagtgagaagcgtctctgcccggctgcccatcgtctgagatgtggggagcgcctctgccccgccgccccgtctgggatgtgaggagtgcctctgcccggccgcgaccccgtctgggaggtgaggagcgtctctgcccggccgccccgtctgagaagtgaagagaccctccgcccggcagccgccccatctgggaagtgaggagcgtctccgcccagcagccaccccgtccgggagggaggtggggggggtcagctccctgcccggccagccgtgccatccaggaggtgaggggcacctctgcccggccgcccctactgggaagtgaggagcccctctgcccggccaccaccccgtctgggaggtgtacccaacagctcattgagaacgggccatgatgacaatggcggttttgtggaatagaaaagggggaaaggtggggaaaagattgagaaatcggatggttgccgtgtctgtgtagaaagaggtagacatgggagacttttcattttgttctgtactaagaaaaattcttctgccttgggatcctgttgatctatgaccttacccccaaccctgtgctctctgaaacatgtgctgtgtccactcagggttaaatggattaagggcggtgcaagatgtgctttgttaaacagatgcttgaaggcagcaggctcgttaagagtcatcaccactccctagtctcaagtacccagggacacaaacactgcggaaggccgcagggtcctctgcctaggaaaaccagagacctttgttcacttgtttatctgctgaccttccctccactattgtcctatgaccctgccaaatccccctctgcgagaaacacccaagaatgatcaataaagaaaaaaaaaaaagaaaaaaaaaaaaaacacttgaccaaaatagaaccacaagttctcataaaataatagtcacttatttagccaaagtgataattaaaagattaaaaaaaaaaaccaccaaaatcttgggctgggtgcagtggttcatgcctgtaatcccagcactttgggaggccaaggcaggtggaccacaaggtcaggagtttgagaccagcctggccaatatggtgaaaccccatctctactaaaaataccacaattagccaggagtggtggtgggtgcctgtaatcccagcactttgggaggccaaggcaggtggaccacaaggtcaggagtttgagaccagcctggccaatatggtgaaaccccatctctactaaaaataccacaattagccaggagtggtggtgggtgcctgtaatcccagctacttgggaggctgaggcaggaaaatcgcttgaacctgggaggtggagattgcaccactgcactccagcgtgggtgacagagtgagactcccgcctcagaaaaaaataaaataaataatcttttattgtttgatacaggagattcagtttttcaatcaaaagacctgaaaaagccagcatgagaaaagtcctattttttctgtttttccttttcaatttattcagaagatgaacaaaaatattttcctgtgtcatattaataatacatacactttttgttcaggattaaatcagcttttacatttttggagcctctgatgttaaatccttgatggcaaaaggagattgatctgactcaaacatggacctctgtggttcctctttctacaataaacatgagtctcaaaaagaggccacaaataggtcaaagtctcctaaaacacaaacttaaaacttttacagtaataataacatcactattgaaacatgcaaacaaccacaaaagatacaagtataagacatttacaggatagcctcaaatatagtatctgaaaatattacagaaggcatggaaattttaattaaaaataaaaattctttattttaaagttataaaaatgtgaaatcttatcattatgaataaatccacagtcagaatggtggcatgaagaccccagggcacagctgctatgtttggaagtttagtcctgtgcctttgaagacctcccaaaacccttgcccaaaattgcagccaagagcgccttccagggagcacataagaacccccacaatcccagatgctagcttggaaacaggaccctgttcctggaaaaagaagctgcctgtagaaacatggggagctgctgaaatcctgacccttacactatttcctctgcctgatctcattgcaggtggccatgttcccctggcagtggcagcagcaggctccaggctgggcaaagggtgggagcaggcaaaagatgtgcgtacagccctcacgatgagtgggtactgttagtggcatttctggggcagagcctggccccatgggaaacttcagcaaactcaagggtctgtgtcctgcataacctgctgtgttcccttgtggctccccccatatcagggaccagcagcagccatgggcctgctggctgaggccccactggctaccccttcactgccttcatttattccagcctcttagagcttcagggctgaagaaagtggatgtggcaaatgctacgtggtacagtatacattatttactctctgctttcttataaaaagtttgccaatacctgttcttgagaagtcattaaaaaaaaaccctctatattcttagagttatatttaataaagtaaatttttaaaaaatgtttcacttgaaataaacttttttgggtaaaggtaaaactgtgtccattactctcagtcatcttggttagaataaaccctgagacaccaagcatccaattattaatgccctggaaatgggaatccacctgctgcctttttttctgtaacaaatatcaaattagttcaactagaatatgtcactcattaaaattagcatcaaactagaccatctgacagagattttttcctgccttaaaatggggtatcttaagctataaaaacatatactttgaatcttggtttgtagacatccctcgtgactatggcagtgtttctgatcaagggagcctccacgggaatgcaaccctaagtggttctttaactctcccacagctggttatttagaatcctcacattttgggtaaataccgtaattttaggctcattgaaatttaaactcttgaatcttttcagtgccagactttgtatctatattttacgaactttagtccttttactctgggcatttacaagcaggcaaattttgtcagagaaaaaacagccatattttagctaaatacacattgtcaacatggcaaacagcaaaaggcttacttttaaggtattttggtgtgacttgcttagtgaatctaataaaatagaagcctatctaagtaatgaattcaggggtagttcaaccagaatttttatatatgtacaaatgtttctggtaaagcaaagatattttagagtaacttacagacatttaagaatattgggcttgagcctgggcgcagtggctcacgcctgtaatcccagcactttgggaggccgaggcggccggatcacctgaggtcgggagttcaagaccagcctggccaacaacatggtgaaactccgtctctagaaaaatacaaaaattagccaggcatggtggtgggtgcctgtaatcccagctactctggaggctgaggcaggagaatcgcttgaacccgggagagggaggttgtggtgagccgagattgtgccattgcactccagcttgggcaataagagcaaaactccatctcaaaaaaaaaaaaaaaagaatattaggtttgtataattttttcttatattgttttatctttagatttttagtggtttgattatgatatgcctaagatgtgctttaatttgtattttccttgtcaggttgttaatcttcttagatcaacataataaggttttaccaattgctaaagttttcagctattagttgttgatgtacttttctatcccatgtaattttttttcttgttttttgtttgtatatttgtttgtttgtttgtgacagaatctccctctgtcacccaggctgcagtgctgtggtgagatcttggctcactgcaacctctgcctcccgggttcaagtgagtctcatacctcagcctcccaagtagctgggattacagaggcccgcgaccacgcccagctaatttttgtatttttagtagagacggggttttgccatattggccaggctggtcctcgaactcctgacctcaggtgatctgcccacctcagcctcccagagtgctgggattacaggcatgagccacctgagatactctgtctcaaaaaaaaaaaaaaaaaaaaaaaaaaaaaaaaaaaagattgcaggccgggcgttggggctcaggcctgtaatcccagcactttgggaggccgaggcaggtggatcacttgaggccaggagttcgagatcagcctagccaacatggtgaaaccctgtctctactaaaaaataataataataataatacaaaaattagctgaatgtggaggtgtgcacctgtaatctcagcaacttgggaggctggtgaaagagaatggcttgtacccgggagggggaggttgcagtgagcctagatcacgccattgcactccagcctgggcaacagagtgagactctgtctcaaaaaaaaaaaaaaattacataccataatcaagtaatattttttcacaaaataagtgttggcttaatatttaataaatattctctaacatattacaaaatattatttgcccccattttctgcatctgctcaccctgttcagaacccaaggtgccatgctgcttctgcatctctaagaagccaggtgcccgaccatgagaactaggaggaagggagttgaaggagccagaataggaggcgtgctgtggaagcaggagtgaccagacctccaggcacaggatacccaggacagaggggacagcagggctgggagctccatgggtcaggcaataacaggtgccagaagttgccaccatttcacacctcaggcaggggcactggggcaaatctgaaggcactcacggactgggtgctccagaaatggacaaagcagtagctccagcttggcattgcatggccattatcatgaccaaacaatggggagaaaaactgactctccaacaaatggttcagaaaactcaatatttaaattaaaaaaaaaaaaaaaaagctctctttctctgaacattatacagaaaaagcctatgtatgcaaagcaggaactagaagtaatatttgcacacccatggttataacagtattataagagccccaatatatatatgactgatgctgccatctgtgtcctcacagtgatgcaatgacagcatcctgtgtacacacacagagctaataccatgaattcactcactgagcccatgacttaatctgaaacctagacaactggtactgaaattctccccgctcagtgaatccatagggaatcacttgactttaatatcttgttgggtttgggtttgcatgcaatagcttaagaagtctttttttttttttttttttctttttgctatttcataggactttttcagaatgtggaaaacaaaaacaaatccagaagactttcccactgtctgctacctttgccccagactatcttaaacttatatgcttatattttattaaacaaaacaggtgctctctacaatctctgtgataattatgaggtatttgaagcaagatataaagagtggtttcatgttttaacttaatcttttttgaggttggaatggttcactttaatgaaagattttttgttttaatgttctctgttgttttaaaatgtgaacttgtgcacacatgtgcagactcaatgttcttgctaaaaacataaactacataattaatataaacaacataatacacataattaataaatatataaacaacataataaataaatactaatataaagattcttatagtcactaggccttctttttttcttttcttttttttctcttttttttttttttgtttttgagacggagtttcgctctgtcgcccaggctggagtgcagtggtgcgaccttggctcactgcaatctccgcctcaagggttgaagcgattctcccgcctcaacctcctgagtagctaggattacaggtgcctgccaccatgcatggctaatttttgtatttttagtagagacggagtttcaccatattggtcaggctggtcttgaactgacctcaggcgatctgcccgcctcggcctcccaaagtactaagattacaggcgtgagccactgcgcctggcctttctttctttctttttttttttttgagatggagttttgctcttgttgcccaggctggagtgcaatggcttgatctcggatcaccgaaacctccacctcctgggttcaagcaattctcctgcctcagcctcctgagtagctgggactacaggcgcccaccaccatgcctggctaattttgtgtttttagtattttgtatattaggggtttctccgtgttggtcaggctggtctcaaactcctgaactcaggtgttcgatacaggcgtgacccaccatgcccagccaccagtccgtgttattgttaagtgtcagtgggcatcagttgctaaagtttgtaatacttgctgagtcagttcaagccatattttgtcatctaatctctcataagctgaccccttatttttggcattattcctgttgattcctagtgttgaccattgacctccacctattcaaacttactgtggccagtggacagaaagacattcagtgctctggacatagagtgtttcactaatcttaccttccataattcagtctatagaagattagaaataaggcttccttccttattcaagagaatgctttcatgtgcactcttgattttctgtcagtaagggcagataagtacacacagtcttcagtcatatatattaaaaaaaaaaaaaaaaaaaactagagggcgggcgcagtggctcacgcctgtaatcgcagaactttgggaggccgaggcgggcggatcacgaggtcaggagatcgagaccatcctgactaacacagtgaaaccccgtctctactaaaaatacaaaaaattagccgggcgtggtggtgggcacctgtagtcccagctactgaggaggctgaggcaggagaatgctgtgaacctgggaggtggagctcgtagtgagccgagatcgcaccactgcactccagcctgggcgacaaagcgagactccatctcaaaaaaaaaaaaaaaaaaaaaaaaggaaaaaattaaaaaaataaggcacccaagaccatacaaaaatgggaattttctaagtctatacgaaatacatttcctataattgctgagcttttatttatttatttatttttgagacgaagtctcgctctgtcgcccaggctgaagtgcaatggtgcggtctcagctcattgcaacctccgtctgccgggttcaagcgattcttctgcctcagcctcctcagtagctgggattacaggcatgcaccactgtgccaggctaatttttgtatttttagtagagatggggtttcaccatgttggccaggatggtctcgatttcttgacctcgtgatctgcctgcctcggcctcccaaagtgctgggattacaagtgtgagccaccgcgccccatctacagtacttttttagagtaaaatttgaaatacataattatctcgagattaacgtagaatttaatagattatctaatagtcctgactaattttagtagttctagctctattcttactgaattttattaccttatagtccctaaataagccaactttaagagaaatatagtaaacttcctagattttgagaaatgtttgagtcattacctgatgcaaataatagacatagacatgaacgagttacaaaagaggaataatatttttgatgtgcataaaaactttttaaaactgaatcttttagtactctctctatgtagatgagtctaggaaacagaataggaactaataaattgcaattttctgcagtggaagatatctgcaatcactagaagcaactgaatcagaaaagctgaaatggcctgcggcaacctcagaaagcaaaaaacaggcttgtgtggacagaatgcatactcactaatagcagaatgacagagagattactttttaatgaatatctgtgacattaattcttttgcatcagaacttgattttcattctaaactttcccactatgcaaacatgtatatacaaacaggcacacacacatcctcacattcttacactcatgcaaattcaaccagattttctgcagccaggatatctttaagtacaccagattaaactagataatttagggattatctgaacccaccagagcaattgcttgtttactttctctgtaaatgtaacatcagtatttcctagatgtcccactgatatcttaattacaactttctgataaactactagtgagaaagaatttgaaacagaccctttttctagacatattttatgactctaaaatttatttctattatagaatatagaagacattaacttatttggcaaaaaagaatcacaagtcacaaacttgcaaaaattaaattaatggtgcagataaagttgtaaaattaaattaatgatgcagataaagttgttaaatatctgaaattactagaattgaattccagaaacccctgacatctaagttaatatatcaaaaaggttaaataatttaaacaatttatattcctggataacaccttgatttctagtgtctttaaattattaaaaacatttcagccaagtatggtggctcacacctgtaatcccggcacttgggggggctgaggtaggtgcatcacctgaggtcgggagttggagaccagcctgaccaacatggagaaaccttgtttctactaaaaatacaaaaaattagccaggcttggtgatgcatgactgtaatcccagctacttgggaggctgaggcaggagaatcacttgaacctgggaggcggagatggtggtgagctgagatcacgccattgcattccagcctgggcaacaagagcaaaactccgtctcaaaaaaaaaaaaaaaagaaaaaaaagataccatttctttgtaagtctggctctgttttcaaagtgaatattgttgtaaatcatttatattcttctcctcaaatgctttacttcccatttttgtcttagggaatctgagcatatcttgaaaaaaaggtctatgggaacaatgaccctaccagaggtttcttatggtttcgcacagttttgtgattaaggaagggaatgatcttagcaaaatggcagaaacattgacaattcaaaactgatactgaaaggcatatttccaggtggaaatgcaagacagaagtagaatgattgagaatgtggaaaacagcacttgcatagaatgctgttttgagctttaagtgtaaagaattcctgctttgaatcattaagggatttttacgttattcatctggtgtaaaacacaacacagataaagagagtcagtaaatggaaggttgtttttattttaccaaaatcttatattattttctaatattaatttacttagttcctgacaactaaataactattttgtgcaatgaatggtatttaatgttgatgggtgcaaagcttaagacaaagaacaaggaacaaaaatttctgcagcttgttactatttacaaagcacaaaattcaaatgcatttttaaatttaatactcaaacaaccttataaaattcttttttttttttttagacggagtctcactctgtcgcccaggctggagtgcagtggcgtgatctccgctcactgcaagctccgcctccctggttcacgctattctcctgtctcagcctccccagtagctgggactacaggcgcccaccaccatgcccagctaattttttttttgtattattaatagaggcaaggtttcaccatgttagccaggatggtctcgatctcctgacctcatgatccacctgcctcagcttcccaaagtgatgggattacaggcgggagccaccatgcccagccataaaattcttaataaactctttattctatttttttttttcacatggagtcttgctctgtcgcccaggctggagtgcagtggcgtgatcttggcaaactgcaatctctgcctcccaggttcaagggattctcctgcctcaaccacctgagtagctgaggttacaggcacgtaccaccacacccagctaatttttgtatttttagtagaaacagggtttcaccatgttggtcagggtgttctcaaactcctgacctcatgatacccctgcctcgacctcccaaagttctgagtctgttactgaactcgatccctggtggactgaagaaaggagggtgaatgtggaaagaaagacaaagacaaaagagtatgtttgaaagaaggggtcgggggcaccttgtctctagtagacaagggcccagattttccacagcccttcgtatttattggtaaaagagatagtgagaagggggatggaagaagaggtcatttgctcagtccagagtaggcctgcaagactgcattccttgaacaataggctctagatgtcccagtagataacctcaaggagcccagtgccagggagtgaccaccctcagcaaaccttctggtggcaggcgcagttgtgagtttgctcacatcctccattcatgacaaacagcttgctgtttgatcatatggcctctagtggaatgctgagttggtcacaatccctttggcctttttggctctcaacctctcccactttgtgtttatgtattaattaaaacaatgtaaggccagggtgggcagctctcattttccaattggcgttccatctgattttacagactgtgaacagaagacagagacaaaacaacattattccaagaactacatacaagatgttagttaacgtggtgctttagatagttccaagggttgaggctctccaggccttgctggaattcagtccagtcttctaaagaaggctgaaactcttgagtttgcctatttaaataagaattttgttttgtaattcaccaatatcaaaggtgatgttggatgtgaaagctccctgcaaatgggctttcacaaggccccatggatactcactttggttatattctaagttggttacacaaacatgagtgtgactaaaatgacaacgcaattgctcctgcaattgtaagctttgtacttgttctcctaaccatagaaccatgaattttaacattgccacttcagtttgaaactcagtgttaattttattctgaagtagccatgcttggtcagctgtgcgcgtccagttctccacatactgagcagtttgaatagaactatgcaaagctacagaggacatcacaacagaagttattagtgtgaccaaggaaacaatagtgaaaattatcatgcctaaggctctatggacatgatgagtaagctgagttagaagaagcttcacaaaatgcaaaggaggtgtgagaatacaaggcttggacagactgacaggaatccatagcccagggatgcgatctaaaatcatcaaagtagagacactgtgtgtttgcaatgtgctatgattaatgcagtgatataattggcaagatttacaggtcagttgggtattgtttacctggagctggtccttcttagctgccaaaaaaacgtgaagattaaaaacacaaactgtagaccaggcacaatggctcacacttgtaatcccagcactttgggaggccgaggcaggtggatcacaaggtcaggagttcaagaccagcctggccaacatagtgaaatccaatctctactaaaaatacaaaaattagctgggtgtggtggcacatgcctgtagtcctggctactcgggaggctgaggtgggagaaccacttgaacccaggaggcagaggttgcagtgagctgaaaccatgccattgcactccagcctgggtgacagagtgagactctgtctcaaaaaaaatgaaaactaacaaaaaaacaaaaaaaaaaactgtaaattgagtggtgatattctttacaaatgcaacattaagactgtgtcatttactattgctattattggataatataccaacccagatgttgccattcataaatgggagtgctgccttccatatcgtctctcgaattggtcctttcctccctagataatgccgctgaggaagagatgggctaaagcctgctccatgccaagcaatctgggtggcagatggattggattccagtgttgtataaagaagaagcattaaaagcttgccatcaatgccagcaaagtttgtgccatgatttccgattttcatcttttccatctaactgaactttaggtccccaatccataatgtctccagttaacatagattgttttctaggcactgggccaagacactgggtccaaggaggggggtaggaactattgaagggaatccattctgtagagcagcacaattaggacaattgggctgggaatggttggttagcacaccagttacattaatagaactaagacttaataaggacatgatttttctatagtgactcaaccatatttgagcttgaattgtaagacacctatggctgagtgacatctttgtggtgatacacatgagaagtccttccagtggagcgatataattaatgacattattctgagagtctaactgttctatgtcagggggagttaggggtcctgaagcccatgctccttgatcatgataaatctcaggaggagtgtcactccaaagtataggttgtactgctggggaattgggaagatatgcacgatatgtttttgcctctgcacatggaaaacataccgcacaggacattatggctaacatggccatgaacatgtaattaggggtttttgtctggttttgatgctccacttgtttctcagcttcctgcatggttttcttgagttgcccccaagttattgggttgatgtcgtcgtgactctagtcagccttctccctgtcttcacactcaggctcagctggctcatggctcataccaaggggcgaagcccatggttggccaccctgggttcctccagtctcccattccatggtctcatgcaccttgagggcatccacacggtttgtccatctcctgtaaaaacacgagtataaccttgtcttctcatcagtaaatccactggatctttccattgtccttcttctggggatttccataaaacttttggataaactttcctcttttcctctaacacttgccaatgtctttctgctggagccttaccatctgtaccagaagtcaaaaaatttaaagtaaataaggctaaatgtagttttgactgaggtggtagttggcctcctataccccctttttgtgttttcaacatgtgttgtaatgtttgatgtgcccactttataatgccttgtcctctaggattataaggaattcttgttttatgggttatagctcaaagctgtaagaaattttgaaaagcatgactagtataagcaggtccattgtcagtttttaattgtttatgtatccccatatgaacaaaggatgacaatgtcactgtacatgaccaattgtctcacctgtttggcatgtatcatgcagcatatgagaataagtgtctatagtcacagaaatatagctaagcttaccaaagtttgctatgtgtgtaacatccatttgccaaatttcatttggagccaaacatcatgggttacagccttctacaggtgtggctccggggacatgctggcaaataggacaggcttgtattatagccctagcttggctgcgagataaatggaacatgtgagtaagggcggaagtattttcgtgcagtagcgcttgctgaaacacagaaccaatcaatttatctgctttatcatttcctaaggataatggtccaggaagttgtgtgtgagaacaaacatgagaaatatgaaaaggagctgcacaagaataaatatcatgttgaaatcttaaaaataaattaagcagttccaggtctagtgtacttttaattgtagcagtttctatgcaactggctacatttacaacataagctgaatcacagaaaatgttgataggatctgaagctgtgagctgtaaaacctgaatgactgcaattaactctgagcattgagctgaaaccccagaggtcattaatggttcagtatgtttaggtccatagacagtggcacagcctttggaacagccatcagtaaaataattctggccacctggaataggcttgtgatgagtaatcacaggaagaatgaaagaatgcattttataaaactgcaaaattttgtctgagggataatgatttttctattattcccacaaagtctgcaaaagcaatttgccatgcaattgacatttcccaagctgtggcctgttgctgggagtctaaaggaacaataattttgtcagggtgatatcccgtaagcatttttgacctatgcctgcccctagtcaccatttgtgtaattaaagaaagataaacttgcaaggtactgatggtttgattaggtagaaagagccattctattactgttacagacttgtctatgaactggcccaaaagtcctactagagagtggggggtaggaagaataaacaaaagcaaaggtttttgcagttgtagctgtgaggcatgtctctgctgtaacatttgctctacaagccataactcagcgtcttgcctctttagttaattgccttggggaatttaaagaagaatctccttgcagggtttggtaaagatgtgtaagttgataggtaccaatacctaacattgggcatagccaattaatatctcctaataattgttgaaaatcatttaaagtctataacctgtctttacaaagaactactttctgaggccatacactcctctctgtaacaatagttcctaagtattggtatggagaagttgttcgtaccttctctggagcaattttgagattccaattaacaagagctcactttacttctctgaataattgatgcaatacttgatctgtaggagtggccaaaagaatatcatccataaaatgaatgatgtaagcagtaggaaacatattccgaggctcctttaatgcctgtcctacaaaatgctgacatagcacaggactgttaagcatgccttggggtaaaactctccattgataatgagaaacaggttctctttgattaatagaaggcacggagaaggcaaatcgaggcttatccttctcgtgtaagtgtatggtaaagaaacaatccttaagatacattaatagcctctggagatggtacacctttctgtaaggtgcccatcggtttaatttttgcattaatagttctcaaatcttacagcagtcgccatcttccggacctttttggaataaggtcctgtatccaattgttcttttactagctgctgatgttgcatcagcttctcctgagataggggccattgatccacccatatgggtttgtcactaagccattctaatggtaaagcagagggtggaggagaaatatcaatgacccccatcagaaatcctgacattctagcccttttctatctgtttttccagttattgatatcgggttagggtttccttgtaggaacctccccaaaccttttcctttctgatatcccatgttcttcaacattttaaatcctgggtcatcaaagttttcatttgtaagtctcatatcccatgctgtaagtctcaaccccataaattgatagctatatttgcaacatagggctgaaaagtacatgactgtccatccagaccaagacaaggtaaaatctcagcactgtgttgaacactttgagctgtttctactcccactagggatgtagaagttaattgcaagggccaggatgggagccatttgtctttagatattactgacacatcagctcctgtatccataagcgcataaaatttatttcctttaatttatactacacaggtgagtctattagaggctagggttggcttagatagatttcccaggtgattgtgcttcccaaaacctttatttcctcatttctcctttcatggagaagggtgtaatttatagggaataagcaataattgagcaatatgttctcctggttcaaaagcccaaagatcttgtgacattaaaactacttgaatttctccttcataatcagagtcaacaactcctgggactacactaatgccctgtaagttaagacggcttttgcctaaaattagtcccatgtatcctgctggtgaaggtctccaaatgccagtgggattcttggtgggtttgtcttccccaactaatgtaaccctttctctggccatgagatctaatcctgcacttcctggtgttcctggggtgagggaatcaatgtgcctccgggaacatcttgtgtgatagaaacctaagctcttagggtatggtctcacagttggcaacataactgattcttttaagggtatgttttggatgatgcgggcaatcacaagaccaagaaatcttacaggctgcagcctattgtgacacttctcttttggaaaataaactctgtcatcagtggcaataatatgtacaaaatcaggacagagaataaagactcagcaaatgcaactaatttgatgcaaggagaagcataatagaggaacatcagtattcaaatgtgtgtcaattctagtgataaaattttttttacaacctctaggaaaaaatggaaagaatattactacaattctaccaggaatttgatgggtctaatcaaggtagctcacctttccaggatttcagcattggtaattattggcagtcttggtgctcatttgcatcagtggccagtatcagtgaaggaaagtccatgagttcttgaactcatggaaaatcttctccctcctaccatgtccacattgtcttccatggacccattaagcaaacattgtgaaaggtatggaaaaagtctaatatccaaagcccagtcatccatttggccatatatatatatacacacatattttttgtttgtttgtttgttttgagatggagtcttgctctgtcaccaggctggagtgcagtggcgccatcttggctcactacaacctccgactccctgattcaagcaattctcctgcctcagcctccaaagtagctaagattacaggcacgcaccaccacgaccagctaaattttgtatttttattagagacagagtctcaacatgttggccaggattgtctctatctcctgaactcatgatccacctgcctcagcctcccaaagtgctgggattacaggcgtgaacaactgcacctggccctattagccctattattggtagcttctcatactcacaaaaagcattcacataggaaacaaatattcccatgttcattccaactggtcaatcatatacctcattgcagactcattattgctgaatcttttgtttatatcaaagtctacagttccagacttatggccattagcaataaatacatgcagatgcctatctctaaatgatgtaaacaaaaactatatgttgttcaaatttctgccatttggaaagctatcttttccccaggtttttttttttttttcagggccaaataactaccagcttaaattatactggaaatagcatattgtacagaatcatctgtggataggtaaattatttcccccattggttacctgttaataagaaacaccaatagggcctcagttgtgggttgaaaggtggcaatgcatggaggtaggtgccatggaggtctgagtcacctctacatgcaacctttttgtgcccatagcacgtgcttcagcttgatggcctatagaccagtgttccttacttgtctacagcaactgtgtataccatgctattttccagtagatctcataacatgcaattcataatggatatttcaggtcttgttacatcatatcccatgatcagttgttcaatctctaaagaagtgcagtggcaagccaagacctatttccaatacatttgtcaaaactagatttttttttacatccctggaattctgtactgtggttgtcagttgggcttgccaactgtcagttctgcagtaggtcacagcaccgtgacctgctgcagatgcttcagctccatcctgtgtcctctactgcagagctgccttccctccagccacaccagctgcagaactgcctcttgctctgggcttcagtaaagataggcagctttctgggtcactctgtacatgtgttgaagcagcattctcaaatgtggcatattttgtctccaaaatataaagagattaacaatggttgtgccccttttgcagaaataggtgatttcagttccatgagcttttcttacatgttgaataggctgtcttgacaatctgcagaccagagcccctagagattgacctggtgcattaatctctgcagtggcaaaccaagcaaattcagttgagctataacagaaattcagatctttagtctaatgtcagagcagcagaagtgatgtgttcttcactctgtctggaatgctcttatctgaaatacagacatggctcttttatttattttgggtcactgttcagattttctgagcctgagactttcatttagaaaatgacacaccactatcactctccaagtcttttactttgctttttgcttttcttatataatcatatgggtgggtggtgtatatatagatatttattgtgtgtatataaatttatatataaatatctatatatacacacacacatatcaatttgctgtggttatttatttacattcttgtcaccccaaaataaaaattctttttacatagaaacctaagtgtattttaattttgttctacctattctgaaatcctcagctcccaaaataacgcatggtacacagtaggagctcaatagacgaaaaaatccagttttgaataaaattatcataatcattacagaaggtgaagaggcagcaggcatacttcacttggccagagcaagaggaagagagtagggggagggaggtgccacacactttccaacaactagatcttgagataactctatcttgagaaccgcaccagaaggagaaattcgcctccatggttcatttacctcctagcaggccccaccttaaacattggggattacaatttggcaagagattttggcagggacacatatccaaaccatattaccatcaaatataaaaggtagaatacatttacttttagatatccaaggtctttaaaaatgtacctaacatgcacactctctggataccaggatgcaaactgtctgtggaatcagcaagcaaaacaagagcagaaccaaacagaaggagactcagagacagggaagccatttgagggagtaaggaggggaggcttaggtcacagctttacactcttcagagagaaaccaaatcagaggaggaagaaggcaggctgcaggagagacatctgcagggaaagaaaaaatgtaacccagagataatttaaagtgctataaacaaatgaaaaacaattttggggcaagtgtaagctaagtggtagtattttagcaaaacttagcaataggcaaaaagaaaatcaaactaatataaagtgaaataactatttaattcaagaaataaatttgtattaaaaaggtaataaaagggcgggtgtgctggctcatgcctataaccccagcactttgggaggctgaggtaggcagatcatttgaggtcaggagtttgagaccagcctgaccaacatcgtgaaaccccatctctactaaaaatacaaaagaattagccaggcgtggtggcccacacccgtaatcccagctacttgggaagccgaggtaggagaattgcttgaacttggcaagcagaggttgcagtgagcccagatcatgcctctgtactctagcctgggtgacaaagtgaaactccgtctcaaaaagaagaaaaagaaaaaaaaaggtaataaaatcatagtatactgcttgggtgtttagtaaataatatttgattaatcaccttacagcattcgctgactacaagtttaggtaaaaataatgttattagtattctgaattgctagaatggtggggaagggcagttaacagaaaagtggtttccaagtatctctcagtattaaagggcagtttttagagtttatatggtttaaggtcaaatagatgaggaaaaaattaactgaaagaaggagaaaaactaaactttacaaaaaaaactcttcatatttattatcttcattaaaataataattttctcaaggataaatctcaagaattagcaaattcagggtcccaaaagtaacagatgctgtggaactggatgctctaaaaccaagtataacaaaatctcaggaaaataagcttctcaacgaaaaacttgattcacatgcaagccaactagaaaaaaagaaaatacagctttttaccatcaactgaaaggactaataaggaggggaacaaagaaaaactactttatatgtctgctagtttatgtacctaaaaagtagagattagggattaatttcatcatattgtttacaaaaatttgtaattcggctgggtgcggtggctcacgtctgcaatcccagtactttgggagaaaaaaatattaaaacttttgttactgcaaacctatgaattttgtacaaatctaaacagtgctaattttaaaagacctgggcttggagtggtggctcatgcctgtaatcccaacactttgggaggccaaggtgggcagatcacctgaggtcaggagttcgagaccagcctggccaacatcatgaaaccccatatctactaaaaatacaaaaattagctggtcatgggggcatatgcctgcaatctcagctacccaggaggctgaggcaggagtattgcttgaacccgggaggcagaggctgtagtgagttgagattgcaccactgcatgccagcctgtgcagcagagcaagactccatctcaaaaaatatatatatataattcatttatcttgattatatctgcttagcataataccaatatttactatataatatatttaggcctatttccacaaatattatttggggtatctcttattataaagtctatgaacacagtagaagacaatgaaaatgtttattcactgagtgttacagtatttcaggtatctttacctagagtattaaacctaatatttctaaaccaaaatccaatctataaaaaatcaacttaaaattttttttagattttgatgaaaatataatcctggaatatattgctaggaacattatgcagatgtagcaaatatttgttgagctgaattaaagtctccaagcctataattttaaatttttcttgatgcaatttcaaaaatttcctaaggctataagaacttagtcatacatacagaaaatattgatttcaataggtaaggtgtggcctcaggcaggcaaagctcaaattatttttgaaaagttttctaattctttttaacatttttatattattttaaatgttctactttttgtaatttgttttttgattccttctttgctacataaatgaaaagtaacacacaaaccatttctgaaatcttcaaaaaagctttggatagaaaatctggagattattctggcttttttagtgtagacatctttgaaagttttcaaattgaagaaatatacaaatagaaatattctattaaataggatacatgatactgtctatagaataattaccttggctttagtttttgtagctaataatttttaagattacttcccctacattttattacttcggctagaaatcttgtttatttaagttattgttagcttagtcaaacttcaaactgtaatattggaattaacagagcattgtcagaattctgcaaaaagtcatctgtatattctcaagtttttatatcatagaaaggcctttgccaggtgtggtggctcatgcctgtaattccagcactttgggaggctgagacgggcagatcatgaggtcaggagatcgagaccatcctggccaacatggtgaaaccccgtttctactaaaaatacaaaaattagctgggcgtggtggcaggtgcttataatcccagctactcaggaggctgaggcaggagaatagcttgaaccatggagtcggaggttgcagtgagcagagattgcgccattgcactccagcctggcgacagagcgagactctgtctcaaaaaaaaaagggggttcaaatccagtacttagagctttctaggtgtttctagccaaattcagattaaattggctaataatgtctttcaaattgttgtaccatgctccaatattgaagtataacttctagaaacaaatgaaaaacaagttgttttcaaattatatgttcttagttacactgtaacacagtatgaagccttgaaaatatctgaagagagaaaatggaatcagcaatgatccagctgtgacctcactacttagtaattgtgcttttagccaacttatttacttatctctgaactgagcacatttctggcaaggtggtactaatcactgatcaaaactaccttaaaaaaaattcagaaatctcagggtatccagagaaaatagagcaggtgctctgaatagtcaccattaacatttcactttgtttcagtatctatttactatcacttaagtacatacaaagaatacaagaaaattgcccatttctcatttttaatgctaaccctaaaacaataaggcttttgcagcttgaaattaacagattctggccaggcagggtggctaacatctgtaatcctagcattttgggagggagtggaaggtggatcacaaggtcaggagttcgaggccagcctggctaatatggtgaaaccccgtctctactaaaaacacaaaaattagctgggcatggtgacatgcacctgttcccagctgctcgggaggctgaggcaggagaattgcttgaacctgggaaatggaggttgcagtgagcagagatcatgcaactgcactccagcctgggcaacagagcgagactgtctcaaaaaaaaaaaaaaaagaaaagaaaagaaaagaaaaggagagaaaaaagaaattaacagcttctcactggtccttcaacagaaggttaaatgatgatggagtcagctgcaatggaaaacactccaaattttccatggtaaacaaatctggcctcagttcttgcagttcccaaattcacagttcttttgggatatgttgatgcatgagctgcaaaagataaaacattccacaccagaagattttgtttataaaaacttattcccatctaataattttaggagatataaacacagcaatgttaatgactacctattaattgttaattcttggagaaaaattgacagttatttctgaaaacatgaaaagcttcatataataattagaaccttacatgtgaaattctatttattatggagaagttaataactaatatgttaccagcaataaaatataaatcatttctcactgtgttaccaatggccagtccgcacaggtttgcagtgattttggtttttgtcttctcaaaagaaagtatctagccaagagacaaaaagcaaatttgaagcaaaagttggactttattgaaagaaagcaaagtagctttggaaagggaccaaatgggtgacttagagatcaagtgccctacctggcccttggctccagtttcttacacattcacttattttctagtattatggactcctcccctggtccctttggcatgattaatgcctcactgttgcttgtgcggtacttgccagcagtagggaagtcgtctgcatgcttcatgagtgttctgaggttctatgcttgctctattggagatattatttttaccagttgagcacctccagagaaaggcatatattggttaaactccactattttgcctctcactgtccatgcttggatggtcttgccaaatttttgagattttattaagttgttgcccaagcactcaaaatgttttctatttgttagaagggtgcccctacttgtcaccagctgagaccacttatcaatcctgaggtgaccacctgataatcacttgacattcctggggcacattcccagggcctctaccttacccaactcatcactatctgactacctgctctaactgggtaattggatattctattgcctgtgaaacttttggtatctaaaacttttaccagtcaatatatacagcccatcaactttcttcactttaattgtaatatgagtttcattttcttttgctgatacagtagttaagattttattttatacttactcatttattaattttgaaagcattataattaaaataaaatttatatggctgccatctaatatgtttgtagatgttagccaaaagtctggcacgggaaaagaaggagaaaaaaaagtagcaggagggagtttttatctttctaaatgattatatgtgcctcctaaaaggtgtttacctataaattataggtggtggcagcagtagcagacaaaggtgtggtatgcagcccttgatcatttcaatgctgctcctgttgagcccatggcaacccagccctgtgtgtagccctcatcctgcactatgtcatcacatcccccctgctggcatgggcacatgagcctcaggcagaccgcaggtgcggggcctgagctggcctctcctgctgttgctactgctgctgcttgagctgctggcctcaggagtgcaggaaacatggggtcactggggaactgagaacagccacactggcatagtcgacaccttttgctggagcatccatagcctgttgtgaaaaggcaatatctgctgctcaaaagatcttgacctggctcaccaagaagtttgtgttgggagtacatatgtttctacagacattgtggagagtctagtaagaggttttggatgttcttggacttgacatctccaacctgtcccagcattgcaacccagcctcagtggccagcagcctagcctaggcccttcttttggtcagtgccagctgcttggcctactgattctagtttctgaccctggacataaccttcaaagcactgcatctggtgttcagcacttcttctggatcgtgtggaccatcctgttctccaggtcctgcaagcacattctgcacaaggataagggtgaggaatgaggtgctccctgtgcttcacagtaaagtccaccttatgacctggcccatgggcttttacaggcatggcagctctactgtaaataagaagctggagcacctgagaacaaggtcagacttttcaacatttgcctcaacagggggctaaaaattctccactgctccaaagaagcgtaaaggttagccaaccataagtgccagtttcttttttcttttttttttttttgagacggagtctcactctgtcacccaggctggagtgcaatggcgcgatcttggccactgctacctccaccttctgggctcaagggattctcctgcctcagcctcctgagtaactgggatgacaggcatatgtcaccacgcccagctaatttttgtatttttagtagaggcagggtttcacgatgctggtcaggttggtctcaaactcctgacttcaagtgaactgcctgccttggcctcccaaagtgccgttacaggcatgagccaccacacctggcccatcagtgccaatttctaccagtgcactgtctcaaaaaaacaaaatggagggaaaagaacaaacaccagaccccaaacaaaaaaaaaatggctgagcaagtaggggcaaatagtaaagatttttttttttttttttgagactgagtctcactctgtcaccaggctggagtgcagtggggcaatctcggctcactgcaacctcagcctccagggttcaagcgattctcctccctgaacctcctgagcagctgggactacaggtgcgcaccaccacacccagctaatttttgtatttttagtagagacggcatttcaccatgttggccaggatgatctccatctcttgacctcgtggtccgccagcctcaccttcccaaagtgctgggattacaggcgtgagccaccgcacccagccgcaaagatatttttatccttttattagttcttgggacagctctttttattcccagaagaataaaaacagcatttgtgtagatctacacatgaagtgtcattagtagaaaagcgtttttaaacaatgtatataaccacatttgtctgtaaagtaagagaaatttgtgagtagagaataaagttaacttttcctagcatttaaatatatttttgaaagggtaattcataaaggcagattaaagcttcttaaaactttacactgaggaaagaatatgctaatttgacattttagaaaagtttaaatgcaggccgggcgcggtggctcatgcctgtaatctcagcactttgggaggctgaggtgggcggatcacgaggtcaagaaatcgagaccatcctggccaacatggtgaaaccccgtctctactaaaaatacaaaaaattagctgggtgtggtggcatgcacctgtagtcccagctgcccaggaggctgaggcaggagaattgcttgaacccgggaggcagaggttgcagtgagccgagatagtgccattgcactccaacctggtaacagagtgagactccatctcaaaaaaaaaaaaaaaaaaaaagtgtaaatgcaagtgtttgtttttgcagcttagggtttgttgggtaagatctgtgcaaattatattgacttagttcgtgaatgttgtcatttctaaatgtggacagttgggctggaggattaaactcaacctcttttgaattctggtggccctctgccaacactccatcattcagatttctaaatgaaacaattatttttagaagacctaagatttttttccctctgtactttgatgtattttaacctcaatattttgaataggaaaaggaatggaagagatgccaaggggtttgatgccaagagctatctgggtaaccgctgaagatcattcaagactcaatttaaagtccaaatgttactgctagccagctaggcctatatacaaaagctatatcctggaaggctttttgttggtttcattttggttttggttaatgcgggacatgagaaggaaaacaaacagtagtggctaatgacattctcaaatctattgctgcttagaaagcattctcacgaacagtaagcagcaacagacaagccttggagaaaatctgaatggttttctttgaaatacttatagtagggttgttaggtgctttttctgaggcctattctgctctcattttaggtggcctctatcagcagagactgagacatacatagtggacagctgtgaggaccctgggcaagggagattcagaaggcatgggtcagggactggtggaaacactagtctgctagaactcattaggaagtgaagcccagcatttgcataatgcagctgtgaaggcgtctggtgatcataaatgtctccatggcccttctcagcccaccaatgtgctccagcagccactcacacagccctgcatgcaggtttgtaggtagtcctgtcagatctgctagaatcaagaccttatagtccaggtctcagtttgaagaaaacagctgtctacccactcttgtgaaaagattctgtgaaatttaactttgcattgcaagtgtttgggaaacaggtgtagatttctttgaggatgcttacaaaactacagttgttttttttgagatgaagcctcactgtcgcccaggctggagtgcaatggcgtgatctcggctcactgcaacctctccctctggggttcaagtgattctcctgcctcagcctcctgagtagctgggattacaggtgcatgccaccacggccagctaatttttgtatttttactaaagataagaaaaatgttctctccacagtaagaatcaatattatttcatcactgatattttccgtctctgacttgaagctaccaactaactccagcagaaatgtttttggcttattatggacaatctgttacacagcaagcaccatcatgcttgttcactatatttatgtatagaaacatcctcataaggccaggcgcagtggctcatgcctgtaatcctagcactttgagaggctgaggtgagcacatcacaaggtcaggagatggagaccatcctggctaacatggtgaaaccttgtctctactaaaaatacaaaacagaaaattagctgggcatggtagtgtgtgcctgtagctactcaggaggctgaggcaggagaattgcttgaacctgggaggcagaggttgcagtgagccgagatcatgccactgcactccagtctgggtgacagagcaagactctgtctcaaaacaaaacagaacaaaaaaacttcagaacttatgaagcctccctagtatttacctgaactaattagctcaataaatttacatatgtcaattatagaaagtgaaatgaacaatagctaaagtaggtttatatagaagtctccaattaaataaacaaaatcgaatatcctaactcaatataacttaaaacactaattgtggaattgcacctaaaaattattttgtgtgcacaactaaatttcataaaaatcattcttataatccccagtgagcttacataatacctcataaactataaaagaaaaaataataaaaaagaaaattatgggtctagcatgagtaccaagcaagtaaaaaaaaagtttgcatggggagattctgaaccataaaccataagatcttacagtaatgaattcaatagaaagcagacagtatagatttcctttcagcatttttgaggtttttagttttctagtaaattagtcaccttattaaaattacttgttttgcttcaatattgattttttcttcctaaaataggtagacactcatacaagaacagttacttactccataattttcttacacctaaggtttatctttagagtaatgtatgtgtatatttaaccctatgtaagtcaaaactaaaactctgtatgtgtttcaggcagagcggccacatagtcaaagaaaaatatataccaatgtttattcatgactcaggaatgtatggactttatttatacttctatataatttttataattaaaatgaccctgtagtcaataacaatttaattgtacattaaaataatgaagtgtagaattggcttgtaatacaaaggataaatgctgaaggtaatagatactttatcctgatgtgactaatacatattatatgcctgtatcaaaacatgttatatattgcataaatatatacacatttggccaggtgcagtggctcatgcctgtggtcccagaactctgggaggccgaggcaggcagatcatgaggtcagaagatcgagaccatcctggccaacatggtgaaactccatctctactaaaaatacaaaaattagcctggtgtgatggtggacgcctgtaatcccagctattcgggaggctgaggcaggagaatcacttgaaccggggaggtgggggttgcagtgagccaagatcatgccactgtactccagcctgggtgacagagcgagactccatctccaaaaaaaaacccaaacaagtagtgggcgcctgtggtcccagctacttgggaggctgaggcaggagaatggagtgaacctgggaggcggagcttgcagtgagccaagatcgcgccactgcactccagcctgggcgagagcaagactctgtctcaaaaaaaaaaaccaaacaaacaaaaaaaattatgaatagcacaaagaataaaataaggtaattaaaatcatactatgtacccacagaaattaagaacagtaagtttaaataagacaaaaaagaatatttaacctatagaaaaatattctttaacttatttgcagttgaaagccactggtgaaatagattaatagaaatgttagtccattatgttaccaaatagtatattgttaccatcttttacatacactcttgagtaaggtgaaataggttaaagttagaagcataataatgcttcattgaatgtacaatggtcttaacacatttttttaaaagttatatttacatgtaatctaaaaatttaaaaatgtacatttaattacataaaattacaataagtaaaatgacttactaatttaaccaattttaactaaaataaaaaacttttgtcactataatgcagaagaatattactctgaaaacctatctcctgcatcactcctttataagttaaccacaaagagcctctccagttacattttcatcacgcatcttttttttttttttttttctttttgagatggagtttgacttttgttgcccaggttggagtgcaatggtatgatttcggctcactgagacctccactttccaggttcaagtgattctcctgcttcagcctttgaagtagctgggattataggtgcctggtaaatttttgtatttttagtaaagacagggtttcaccatgttggtcaggctggtctcaaactcctgacctcaggtgatccaccggcctcagcctcccaaagtgctgggattataggcatgagccaccatgcctggctgcatcttacactttaatatccttactgttccataaaaaatgttttaaataatgcccacctaataaaagaatctctcatatctttggtgcagcaacaattggtcacatgctttcacatgtgaatatagcaggaatgaaaaaagagcataaagttatttgagagtttaattacatcattattcactaatttaaaaatcagtaattttttcaagataaaagtatactttaattgtaattataactgaaaatcttctacttcttttaatgttatatacaaataatttatccaccaagttttattttgtgttgttttctgtacttagcactgatttagtgtaatgtctgaagtgtccgcgccttagatatttctactgtgaattctcagatatttacataaacttaatttcggattaaatttttttcatttttactgcatctgcaaaaacatattttagtatgaaccctgtggtgttttctatgctgtggtttttttaaaaatgtttttccaaactgattacatttgtagggtttttctccaatataaattccctgatgttgaataaactttgtactatcaaccaagcattatagaccctcatgttttataagctgtagtttttcaaaactgtttttacaaatttattacattttccaggggttttttccaatataaattttctgatgttgaacagtatttgagcaactgcttcagggttttctttagtacaaaatgtgtacaataagatctgtgatgcaagtaatggtactacaaccctcttaatatttgtaatgtttgtcttcagaatgaattatcttcttcactttaaaggcttttattttctgaaagatcttttgacactagttgcatctataatggttttattaagtacagactctctgatgttgagtaagatatgagcacatattaatggcttttccacattctttgtgtatatacctttttccaagtaaaaattctttcctgtgcaataaggtacgagcattaattaaaagttttgccacattcttcacacttgtagaagtttactccaatgtaaattatcttacctacaatcaagtgtgacaaccatgtaaagcctttatcacattctttacatttctagaatttctcaccagtataatttattttatgtttgaaaaagtttgaggtgttgtcaaaatcactgtcacatcttcaggtttgtagagtttctctccagtatgaattttgttatgtgtagtaaggtttgaatattggttgaaagctttgccacattctttacatttgtagggttgctctttagtatgaattctcttatgtgtattaaggtgtgaggaatagttaaatgctttgccacattcttcacatttgtagggttgctctccagtatgaattttcttatgttcaataaggtttgaggatcggttaaaagctttgccacatttttcacatttgtagggtttctctccagtatgaataatcttatgtgtagaaagggttgaggacagtttaaaagctttgccacattcttcacatttgtagggtttctctccagtatgaattatcttatgtttagtaagggttgaggaccacttaaaggctttgccacattcttcacatttgtagggtttctcctcagtgtgaattatcttatgtttagtaagagttgagaactggttaaaagctttgccacattcttcacatttgtagggttttcctccagtatgaatttttttatgtgtagtaaggtttgaagattgggtaaaagctttgccacattcttcacatttgtagaatttctctccagtatgaattttcttatgtgtagtaaggtttgaggattgggtaaaagctttgccacattcttcacacttgtagggtttctctccagtatgaatcctcttatgtttggtaaggattgagaaatggttaaaagctttgccacattcttcacatttgtagggtttctctccagtatgagttatcttatgttcagtaagctttgaggaccacttaaaagctttgccacattcttcacatttgtagggtttcttttcaatgtgaattttcttatgtttagtaaggtttgaggaccggctaaaagctttgccacattcttcacatttgtacggtttttctgcagtatgaattctcttatgtgtagtaaggtttgagaactggttaaaggctttgccacatacttcacatttgtagggtttctctccagtatgaattctgttatgtttagtaagggttgagggccagttaaaggctttgccacattcttcacatttgtagggtttctctccagtatgagttaacttatgttcagtaagctttgaggaccacttaaaagctttgccacattcttcacatttgtagggtttcttttcagtatgaattttcttatgtttagtaaggtttgaggaccggctaaaagcttcaccacattctgtacatttatagaatttctctgcagtatggattctcttatgtgtagtaaggtttgagaactggttaaaggctttgccacattcttcacatgtgtagggtttctctccagtatgaattctcttatgtttagtaagagttgagggccagttaaaggctttgccacattcttcacatttgtaaggtttctctccaggatgaattttcttatgttcagtaaggtttgaggattggttaaaagctttggcacattctttacatttgtagaatttctctccagtgcgaattatcttatgggtagtaaggattgaggacttgttaaaagctttgccacattcttcacatttgtagagtttgtatctagtataattttttttatgtgtagtaaggcgtgaggaccaattaaagactttgccacattcttcacatgtgtagggtttctctccagtattaattctcttatgtttagtgatgattgaagggcagttaaaagcttttccacatttttcacatttgcagaaattcactctggtatgaattattttatgttgagctagatgtggaagcatgcaaaatgatttgccacattctttgcatttgaaaagttttttttcagtatggcttatcttatgtctgtttgaatttgaaaatttatgaaaggctttcacacatttatcaaatagaaatattttgctctgggtagctggcaaacattggttaaatccattataacctcctctgtgcaccttacactcatccacacttttatggtctttttttaaatgtacatttttatgttcacagtttttatatcttctcagtgtcgctttttggaaaggatcttttatatgctgctctggccaaaagtcttgggtaaaatgagaacacataactgaaaaaaataaaaataacaaattattccacttgctagactcagagataaatatactttatgtaacatataaaatcacacaagctacataagcaagatgtcatagaaaaataccacaggccctaatttatttatagacatataaatgtaacaaaaacatactgatcaaatcagtgaaaaatttacaaataagtgtgtgcagtgccccaggtgagtccaatgcaaagagccacatagaaggaaaatataaattggttacatttacccaacacagctttttctgctctccaacataacatagtgcctttagaagtaaattgccaactccaattattttgcatatagcggaatacctgagagtggataatttataaagaaaaaaggcttattttgctcacaatttggcagactgtacaagaagtgtgtgtcagcatctgtttctggtgagggtctcaggaagcttactgttatggtagaaggcaaagagtaactggaaatgtcacatggtaatagggaaagtgtgaggtgaaggagccaggttcttttaatgaaccagctctcttttgaattaacagagtgtaaactttcttattaccaagactatggtgccaagtcattcatgaggaattcacctccatgacaaaaatacctttttccagatcccacatccaacactgaagattatactgcagcatgaggtttggaaacatggacatccaaaccatatcacagacaaaggagacttaacagactcatacaaacctttccagtaaaaagcaagacaatatacaatattcttctttgcatcttgtgtattctgctaggataaataccaagtcttattaaatttaagaataccagctgggtgcagtcgcttatgcttataatcctaaaattttggaaacaaaagtaggaggatcacttggggccacaagtttgagaccagccagggcaacatagtgagactctgtctctacaaataataataaaaaattagccagggatggtagtgcatgtctgtacacccagctacttaaggggctaaggttgacttgagcccaggaggttgaggctgcagtgagccaaaatcatgtcactgcactccagcctgggcaagagtaagatcctgtctcaaaacaacaacaacaacgacgacgacaaataaatttaagaagaccaaaattatacactgtgtttttcgaccaaaattgcataaaactaggaattaaaagcaaaactggcaaatccaaaaatatatcaaaataaaacacactcttcaacatattcttgctcaaggaccgaagaatttaacttttccaaagttgtcaatacaagctacagtggtgaactaattcaatataatctctacataaaattcaatggtacaatttttcacagaaatattcttcacaattttaaaatttgattaaaaactatagccaagccaggcatggtggctcacacttgtaatcctagcactttgggaggccaaggcaggtggatttcctgctgagctcaggagttcgagaccagcctgggcaacatggtgaaaccctgtctctactaaaatacaaaaaattagctgggcatggctatatgtgcctgtaatcccagctacttgggaggctgaggcaggagaattgctagaacccaagaggcagagctttcagtgagccaagatcatgccactgcactccagcctgggcaacagagcgagactctgtctctaaaaaaaaaaacaaaaaaaaaaaactatagccaagcaactatgaaaacaataaagaggcattatactttctgatttcaaaacatattaaaagctacaataacaatgtggtactgacacaaagacagataagtagatgaaagaacagaataaagagtcctaaaatgaacccttctgtgtatgatcaaatgaacttctacaaagttgccatgaggaagcaatagaaaaaaatctcttcaaaaaatgatgctgaaacgtggataccaacactaataaaataaagttggataattttcttgaattatatatacaaatattttaaataaaacacatagaaaaaaggaactaacaaatcttttaaaaagaaatatggaaaaaagacatgacattggtcttggcaccattttcttagacacaaccttaaatgcatgaacagcaaagaaaagaacagaaaaatttaactacactatacctcgaaattactgtacatcaaagaaaacattcaatagagagacaatgcctcctagaaaatgagtgaaagtatttgtaaatcacatgtgatattccttaatattcataatatacaaacaactttttttttctttttttttgagacggagtctcactctgtcacccatgctggagtgcagcggggcgttctcagctcactgcacactccatctcccgggttcacaccattctcctgtctcggcctcccgagtagctgggattacaggcgcgcaccaccacgcccggctaattttttatatttttagtagagacagggtttaaccatggtctcgatctcctgacctcgtgatccgcccgcctcagcctcccaaagtgctgggattataggcgtaagccactgctcctggcctataaacaactcttaaaactaacaataaagttgaataatctgatttggaaatggacaaataattgaactaaatttttaccaaaaatatacacaaatgggaagaagcatttaaaaagacacaaaattacaatttgtagagaaatgcataaaaatcacaatgaaaaacaaaatcacctatcacccatttagaatggctactataaattttttaaaaatacaaaatctgttgatgatgcaataaaaataaaaccatccaggtaggtacagtggctcacatctttaaacccagtgctttgggaggctgagacaggtgaatcaccataggtcagaagttcgagatcagcccggccaacatggcaaaaccccatctctactaaaaacacaaaaattagccgggcatagtggtgggtgcctgtaatctcggctaccctgaggctgaggcaggagaattgtttgaacctgggacatgagaacaaatcactgcacttcagtctgggtgacagagtgtgactccatctcaaaaaaaaataataataaaaaattacaaattaaaaaaaaaaacctatgttgactgttgatggaaaacaaggaggccgaggtgggcagatcgcctgaggtcataagttcgagaccagcctgatcaacatggaataactccatctctactaaaaatacaaaattaaccaggcatggtggcacatgcctgtaatcccagctactcaggaagctgaggcagaagactcacttgaacccagtggggcagaggttgcagtgaactgagagcacgccattggactccagcctaggcgacaagagtgaaactctgtctccaaaaaaaaaaaaaaattataaatgtttctcagatacttaaaaatgaaatcatcaaatacaaaaatctcatttatgaatctatattcataacagaaaatgcaggacctgaatgacatatgaacatccatattttttgtatcagtatgcacaaaagccaaaaggctgaagaaacttagatgtcccttgatttataaatacatcaaaaaattaatatagatctacaatgtaatattattcagccttcaaatagaaaatcttgcctcattttaagataaattttgagaatattatgtcacctgaaattagcaagtaatgaaattatggataccatatgactcaacttatttgagatatcttaagtagtcacactcataaaatcagcaagtaaaacgctgtttgtcaagcgctgaaaagagggcaaaatgagcacttgttacttaatgtgtatttagtttcacaggtgtaaaatttctagaagttttttgaataacaatgtaaatatttttatcatgagtgaaaagtacttttttttttttaagacaggttctcactttgtcacccaagcttaagtacagtggcacaattatggctcactgtagactctaacttcaaagctcatgtaatccctccccctcaatctcccaaaaagcttgtaccatgggtgcataccaccatgcctggctattttcaaaaattatttgtagagagggaatctccatatattgcccagactagtctcaaactttggcctgaagcaatccacctgtcttggcctcccaaaatcctgggattacagatgtgagtcaccatcatgcctgaaatgtacacttcaatagatttaagatggtaaatttcatgttacatgtttttacaacactaacattaaaaaaaaacaaaaaaatacagcattataaactttttaaaaaattaccctcaaattacaaaagtgtttctctcatacaaagaaaatatacattcatcattaaacacatggtgaaaatagactatttccatgactactaacttagagaagacaaaacaaccattaaaaattagctaaaaaataatatatacaagataagctttaaccaaaattggggtcatatatttataaacacacacacacatatataatatgattgtgatagacatttggtgattgatctctttttttttttttttctgagatggagtcttgctctgtcgcccaggctggagtgcaacggcacgatctggctcactgcaatctccacttcccgggtttgagcgattctcctgcttcagcctcctgagtagctgggactacaggtgcgtaccactatgcccggctaattttttgtatttttagtagagacggggtttcaccgtgttagccaggatggtctcatctcctgaccttgtgatccatctgcctcagcctctcaaagtgctgggattgcaggcgtgagccaccgtgcccggccaattaaagcccaatatgggatttaattatctcttaattaaagcatacagaattgaaaattgtctgaaattataatacataggtaaaaccaaaaaacacaataaactgatgttaagaaacctacactgaagaaatacactaatatgaaactggaaaacaataataagagaaatgtttactcataaaatctggtatgcaaggccaggcacagtggctcatgcctgtaatcccagcactttgggaggccgaggcaggcggatcacctgaggtcagaaattcaagaccagcctgaccaatatgatgaaaccctgtctctactaaaaatacaaaaattagctgggcatgatggcaaatgcctataatcccagctactcaggaggctgagacaggagaatcgctggaacctggaggggcggaggttgcagtgagccgagatcatgccattgcactccagcctgggcaacgagagcaaaactccatttcaaaaaaaaaaaaaatctggtatgcaacattgatgcaccattaaagaagaatttgtttagataactacaatatttgtaactttgtacttctgcatcattggcatgaactgtacagcagtaaaattttagagaaaatgcagtataatcataaatacaagattgtaatgagaaacttttaataaacatttaaaagaaactatagataatttttatattttaagtagatgctatacttacaaaaaatgaaactgctgtaatccaactttagaggcaaagaatagccttacaactaaattacatatatatatatatatatatattttgcagaatacggttacagcctctgatatataaaacaaatatttgggaataaattatattatttataattagggtacaaaagtaggtacaaatcctatcattctcttttacctacagcaaacttaaatttataactatattagtaaatatggagtgcttactgattatctaatttacttcagacataatatgtaaattctagtataattgtcctaaatgtctgaatccaaaattacagacaaatttggaaataaaaaatagaaactgggtcaggcatggtggctcatgcctgtaatcccagcactttgagaggctgagatgggtggatcatttgaggtcagaagttatagaccaacctgactaacatggtgaaatcccatctctacttaaaatacaaaaaaattagccaggtgtgatgggggacacctgtaacctcaggtacttgggaggctgaggcagcagaatcagttgaaactgggaagtggaggttgcaatgagctgagactgtgccattgcactccagcctgggcaacagagcgagactctgacgcaaaaaaaaaaaagaaaagaaaagaaaaactaaaaactaaaaatgtatagggagagtgacaacagtaagatggaaaaataaaaggtgccctacttgcttatccccacagagcaagaacgtttctcagccatcctagacaaaaatgcctttatgagagccaggaggcatcatggctcacacttgcaatgacagctacacggtacattgaggtaggagaattgcttcaggtcaggaatttaagatcaggctgggttatgtagcaagaccccatctgaaaaataagttcctttaaaagagctttgagatccaggcaggcagttgtaaaactcacataaagcccaagattaaggagttttctttttcagaaggcaggctctcattcaggtggcaaactacgggacccctgttcttaactacagaccagaaaatggcccacccaacttggtcccacagaaaattctgaacttactctgtaagcatcccaaactgcttccagccacagtttgggagaggtcctgttcttcaaaaggcctggaggaagatactggtttatagtgatgcaggcctttactgtggaccctgaagcagttcaatgactgttccagctccctgagccatggtttatggccagttctgcctaactagaaacccacacagttacctggggaaatcctctctggtactcagtgaaaaccgcactcatccacaacctgatataaagcccaccatatgcagacccgactgcaaaaaactgccctagtgttctgccctacagaggaaagtccaaaaataaaatggaaattacaactacccaagccccttgtaacaagccaactaaaggcggaccctagtgcagactcagcagccttgtgaccaagcaacgacccctcttcactacaggccaggggtggtggctcatgcctgtaatcccagcaatttggaaggccgaggcagacagatcacctgaggtcaggagtctgagaccaacctggccaaacatggcgaaaccctgtctctactaaaaatacaaaaattagccaggcatggtggcatgggcctgtaatcccatctactcgggaggctgagagagaaggcagaggttgcagtgagccgagattgtgccactgtactccagcctgggtgacagagcaagcctctgtctttaaaaaaaaaaaaaaagccacggtatccaaagtgatctataaatttaataaactttctatcaaaattccagtgggatttttttcacagtaatggacaatgcaattctaaaatatacatgaaactagaataaactttgaacaaagcaatcttgaggaaaaagaacaaagcaaagaaacatcataattcataatttcatattatttaaaggctacagtaataaaaacaggatgaactgtgcagaaaatatacaaagaaatccaatggaacagaaagcactactcacacatttcagacatgatgtaaagaaagaacttaaaaaatagtttaatatacagtttctcaaaagtatgcagatatttgtgtgtcccccaaaagaatggaaaagcagtcagattgttcagtctcttaaatgtcatgaagaggactttggctgtcatggtaaacttgaaggaagatcaccgaagggaaataagaatcctgagagaatgtaaaagcataagacagaagatacccttgtgtgaaagcaaaatgaaaaaactcaggctttccagaaactctttcctttggaacacagcttcccaagtcacattttaaggactggctttccccttaacctttggacttctcatctgtgtttgttgtattcactttcactctcacctacctgggggtttggctaccatttcatgtctcctcataggctcccaaggctctttttcttgctccagacaggtgatcaggtctggcttagagacagcaatacctgtttcaataaaaaataaattacgtgaatcttgctcatattctcccattattaacctagtaatgtgtccagtatgaagggtgtgatagaatatcctaatcattaatcccaaaatactaatttttttttttttggagatggagtctcaatctgtcaccaaggctggagtacagtggtgcgatcttggccccctgcaatctccacctccgggattcaagcaattccaatgcctcagtctcccaagtagttgggattacaagcgtgtgccaccatgcctgattaatttttgtatttttagtagagacagggttttgccatgttggtcaggctggtctcaaactcctgaccgggtgatccgcctgccttggcatcccaaagtgctgggattacaggcatgagccaccgtacctggccccaaaatactaatttttaacaaaaatttcttcttgtttgagacagagtctcactctgttgcccagtctggagtgcagtggcacgatctcggctcactgcaacctccacctcctgggttcaagccattctcctgcctcaggctcctgagtagctgggattactggcatgaaacaccacacctggctaatttttgcatttttagtagagatgcggttttgccatgttggtcaggctggtctcaaactcctgacctcaggtatctgcctgcctcggcctcccagagtaccgggattacaggagtaagccaccatgcctggcctttaacaaaaatttgtaaatatttagaaagtatcttattttgtaggttcttaatttcactacctggtaatactgaatcaaaaattaatgttggcaattagattttaagttgtgggcaacagtattttatgccacttaatttctggaattactactaatctggagtgaaagatcagctcagaaatgtggaaagttcaggtcaagatgaaacatcttgaaaaaaattctttagtgcgccaacaaatcccaatttttttgaaaacaggaatctgaaactcatgaatgcaaagtataaattaccaaaaaaacagtctacagaaaacaaaaatgaaatctttagggtatattaggaattgagtattgaagttatgctcacccaggaagaccaggtttctgtagttctctaacatcacattcctatataaattctgctgtgcaatgtccaggcattgccactcctccagacagaattctatggccacatccataaatgtcaatggtccctaaaaaaaacaacacatacacacacaaacacacacatttaccaagtggccacaggcagaatttataatttgactcaaggtaaaatgagagagtaaagagaacaggtactgacttatagaagagactgaaattatccaataaaataattcttttcatggaattattctccaatgtattttctacccctgagaaaagaaagtgatgtaagatccacaacatcagtgtatatataatacttttctggatgataaactgtaaaattaagggcatgaacacaaaagtaaatttttgagttctctatttgcatcatacagaatcagttgcgaatatttttcagataaagacatgttgagttagaagggacctttaaaatattaaggtgtacaataaactgaggatcctgttaatgaagattattttttcagaagatctggaataaagtctgagtttctaagtttctaacaagcttaccagtaatgccaatgattttggcccagaaagactattttgtcaaacatccagtaaatggaaaagtctgtgttttttttctagtttttctggcaagtaaacaaagataagagctttcattttcaaaagacagataaatgcaaagaaaacctaagaaagaagagcagctgccagattaaatgtgatggtttacgtacatcagttgcataaagattcttaataatatggccgggcatggtggctcacacctgtaatcctagcactttgggaggctgaggcaggtggatcacctgaggtcaggagtttgagaccagcctggccaacgtggagaaaacccatctctactaaaaatacaaaaattagccaagcgtggtagcacatgcctgtagtcccagttactcaaggggctgaggcaagagaatcgcttgaacccgagaggtggaggttgcagtgagctgagatcacatcattgcattccagcctgggtcaaagagcaagactccatctcaaaataataataataataatatatatatataatatatacatatatattaatatattttatatatatacacacacatatacatttaaaaaaaagacaaatggctgggcatggtggatcacacctataatcccagcactttgggaggtcaaggtgggtggatcacgagattaggagttcgagacaagcctggccaagatggtgaaaccccgtctgtactaaaaatacaaaaattagctgggtgcggtggcgggtgcctgtaatcccagctactcaggtggttgaggcaggagatttgcttgaacccaggaggcagaggttgcagtgagccaagatggcaccactgcactatagcctgggtgacagagaaagactctgtctcaaaaaaaaaaagaaagaaaaaaggaaaataattatttagggaaagagtctgtcagagagcccttgataatcaagtgaataattaacataaaatgtactagaacaaattttaagatgtgctgatgcacgcaaaaagacacagcatcactgctgtgatattgcccccaaaaagtaaattataatctaaatttaaccataaagaaatatcagttttatgcaaagttcaagatacagatgtctcccatgttctgtaattttttttttttttttttttttgaggtgaagtttctcttgttgcccaggctgaagtgcaatggtgcgatctcggctcactgtaacctctgcctcccaggttcaagcaattctcctgcctcagcctcctgagtagctaggattacaggcatgtgccaccacacctgactaattttcttgtgtttttagtagagatgggtttcattatgttggtcaggctggtctcaaactcctgaactccagtgatccacccacctcggcctctcaaagtggtgggattacaggcatgagccaccacacccggctgtaattttttttttttttttttttttttaagatggagtctcgctcagtcgcccaggctagagtgcggtggcgcgaatctccgctcactgcaagctcctcctcctgggttcatgtcattctcccgcctcagcctccagagtagctgggactacaggagcccagcactacgccctgctattttttttgtattttttttcgtagagacggggtttcaccgtgttaccgcgcctggccaaccaggctgtaatttttaatagtaatttttagtagtctatctttagcacccataaagcaagtatatcctgatagtatttttcagaactttctgctttataaatgtcttcttgtttaaacaagcattttctgaatcctattctgcatagagctaataaaaaacagactgaaactcaacattacatgttctccatttttagtaaggaccccagttttccccaatagaaatcttgagtatccacaccttcccatgttcaacaaccatgaaaggatcatttttaatattgcagttcataaagtcatggtgagaattctgcatggcatattagaagccatgatgtagagaatgtagagaaggctctgttatatagaaaagaaatattttgcagagacccttgcctatcataaaaatttaaaaagcagttaaaacaaactcattagggaggaaaaacacaagtagcaaagtacaggtttacaagtactaaacacatggcattccaggaagcagagtggacacagctcttgatctgagacatgtttagctgaaaaaaagccatttttttctctgtctctgggaatcctttccagatgagattctctggacaaattacacctgcatcttgagaatatgcctttaaagctgtcagcaccacctatttgcctactaccaccacacccacaggcagaaggaccaagacctgcagaaaaagttcacctatttttgtcctttataaccgaagagattcagcaagaatgaactgctccacggagatgctaatatgagtttcaccttttctatcctcaggtgccctcctctgccatggacaccagcaatttttgctacagtaatggaaatatgggccacactgtcctgtccctaccaaacccaaacagaacaggccctgtaaccaccctttagtgcaaagtaaaacttaactcttgtgtatgtatcttgaaccttttatacttgattctagcctcattttggagtcacatgaggcacttaattaaaacaacatggatgcttccacgcagaatctgaaccaaattataaacagaacaataagcaggcctgacctaaataaggcctccaaaaggggtgaatctgaacagaaaaaaagcagagagatgaacctatgtagaattctgttccgtggccgggcgcggtggctcacgcctgtaatcccagcactttgggaggccgaggcgggtggatcacaaggtcaggagatcgagaccatcctggctaacacagtgaaaccctgtctctactaaaaatacaaaaaattagccgggcacggtggcgggcacctgtagtcccagctactggggaggctgaggggggagaatgacgtgaacccaggaggcggagcttacagtgagccgagatcgcgccactgcactccagcctgggtgacagagcaagactccgtctcagaaaaaaaaaaaataaagaattgtgttccctatgccactgggttatttcctgttcggtttttcctaagcttacctaagacaaaattaaattccagagtttgtgtaattttaatcttttttagccgctgccctgtcaatttcataacatataccaataagcaatttaaacaaatcccttaaggttttctaggagaatttattattgtaagataaatatgtattcttagcaaggtaagatgaatagaaacagtactattttttcaataaacattccttcaagtgatgatatcagaagtcagaacaatacaaagaaagtggacaaataaagccaaagttttttttgcacacatctactcattgtaccaacaatataatgctaaattcaaccatgtatccagttgctagcctagactaaaaattcctggatgatagggatgactgcttcatctatttttttaatggccataagaaatggtagaaattagtttatctgtttgagtctccagatctcctgtttttcacccaactacaagaaaactgcaaaaactctcatctgggtaccatcttacacaagatgagaaacaagaacagcatgactaatttatcctagactgagacagagcagaattaaccattcttgtcagcatgacacaattctgttctggacattttcaaatgtcgcaaagatgtctagttgattgtgagaggattccagtgacccagagctgactgcccaatgataagccgggcaagaaagaatcaggcctttttttttttttttttttttttcgtgagatggagtttcgctcttgttgcccaggctggagtgcaatggcacaatctcagctcactgcaacctccaagcgattctcctgcctcagcctcccaagtagctgggattacaggcatgtgcaaccacacctggctaattttttttgtatttagtagagatggggttacaccatgttggtcaggctgatctcaaacttctaacctcaggtgatccatccatctcggcctcccaaagtgctgagattacaggtgtgagccaccacatccagcctcaggctgattctaaatagaaaatagaactgcctggccaggcgcagtggctcacgaatgtaatcccagcatttggggaggctgaggtgggtggatcacgaggtcagatcaagaccatcctggctaacacggtgaaaccctgtctctactaaaaacacaaaacaaaaaaaaattagccgggcgtggtgatgggtgcctgtagtcccagctactctggaggctgagggagaatgacatgaacccgggaggcggagcttgcagtgcaccaagatcgtgccactgcgctccagcccagggcgacagtgagactctgtctcaaaaaaagaaaatagaactgccctggtagagctccagaacctgcatcacctgtcctgattagctagctcttaggtaagaaaaaaagacaaaaataccctactccagtatcgtattttatgggtaggtatagctgtggtcatagctctggacattttgtggtcttgatctctcactcctaagatgcttgtttacacttacagattctgccattagattctatttacacctggagcctctcacgtaagtgttagcaggtcactgagcaaaatctgaaaagttcaaaaagccacactctcaaaggggtctttaaggtgtctatgttgatttctcacaatgcagaaaatgtctcttgctaattttctgtacattctcaatccaaaacctggccctgtcttgtgaatcccaggcagaggccaaactatatgtacagattctatgttggatcaacctggctctgcattcttgggtgttaaagcaagcagggtacaatcaaaagagatcccctcatagaggctgctgtagcacatttaaaataatatgtttacctaaaaaaaaaaaaaaaaaaagaaaaaagaaagaaaaaagaaatctgaggcaacatgaatataagtaaatcatttatttgggccaagcttgaggattataacctgggagcaatgattcaagttgtctggaatgtaaactttagcagcagttacaagtagatttgtaaaggcaaaaaagaggggcagagagtggactggtacaaagttgtttgtcagccacttaggctgggcacggtggctcatgcctgtaatcctagaactctgggaggccaaggcagctggatcacctgaggacaggagtttgagaccagcctggccaacacagtaaaaccctgtttctactaatacaaaaaattagccgggcatgttggcatatgcttgtaatcccagctactcgggaggctaaggcaggagaactgcttgaacttgggaagtgggggttgcagtgagcctagattgcaccattgtactccagcctgggcaacaagagtgaaactgtctcaaaaatcaaacaacccaaccaaccaaaaaaaaaagttgtcaggaagtcttatttatttacagaaataacactgattattgattggatatacattgttaaggtttaaggtatgggttatagtgtccagtgtgacattattagtttagtttatagctacttgtggcaatagcaaatagtttcaagagataaatacatagttcaaagggaggagaaagaaataattgtgttctcattttaatgtctctgagtttgaaaaaaggacttgcatttctcagattaaagtttttttttatttctcaaatctcaaaacccagaatcagaatttggggctgcagatttagtggagctaaatctggtggtgtggcagcaggtttcacctacacagtttagggcatttttagcaagaggaagaaagtggagatcctcatgtcctcatgtctactcaatgcacacgttactttgatcgggtttctgggccccatggtctgtgaatcactttcaggtctgaggatacaagagtcattgaaaaaggtaaaatagcctgggtcagtggctcacgcctgtaatcccagcactgtgggaggccaaggcaggtggatcaggaggtcaagagatcaagaccaatccagccaatatggtgaaacttcgtctactaaaaatacaaaaattagctgggcatggtggaactcacctgtagtcccagctacttgggaggctgaggcagaagaatcgcttaaacccgagaggcagaggttgcagtaggccgagatggtgccactgcactccagcctgggcaacagagcaagactccatctcaaaaaaataaaaaataataaatgaagaggtaaatggttggttccttctctgtgaagtttgtagaaattttgtctatcctttctagaagcgactacagttaattacatataccaaataggcaaaaaaacaattccacctgcatatttaggggacatcatacactttgcagcacaattgtgaatagatgggaagcctgaaagaaaaagtttcctctagattaaaggttagttggcaccttatgtgtttatattatgtctggtaattcaagacagtgtttggaaatggaatttaaaaaaaatttctgcagccccagagaaactccaaaatgatagaacagaaataaaattgtttattacacaattaaaccagaatgtgagcagcatgacagtaaatctgcttaagagattgcaaagacagaaagagagttcagcaggctcactaagcctgagcagtgattcaggctcagtttctacttacaatggtgacatggaaaaaatactgctgggtttggctgagtgcagtggctcacacctgtaatcccagcactttgggaaggaggcaggcagatcaccaggtcaagagatcgagaccatcctggccaacatggtgaaaccccatctatactaaaaataggtaaattagctgggtgtggtggtgcatacctgtactccaagctactaaggaggctgaggcaggggaatcacttgaaaccaggaggcggaggttgcagtgagccgagatcgcgccactgcactccagcctggcgacagagtgagactctttgtctccaaaaaaaaaaaactgttgggttttcagcatgagttcagatgatgataactccgagagttttcatcgtgcattcacaggcaccatgggacactaacagagcttctgaaacagacacccaaagcattagaaagaaaaacagctctccatttgagtaacactgtattgagaaaaaaaaaaagaagttcaaagcatcttaagaaaaaacttagattagatgaaagattgatcaagtcaaccaaaaatactccccttaaacaaatttctctctaaacgaagtgcacagctactctcagcacaagaaacatgagcattatgaaaaaaatatatattctcagcagaattttctaaggtttctcttccatgtctgctgctgtctcatctcctagccattggatgggagttccatattggaatacatctcacaatttccacatgcaccttttgatgaagaattgaaatcttgagtttattcatatagtgtaatatattcaagcttgcaacactgctaactgaagagctactatgtggtttttttttttttgaaatgaagtttccctcttgttgcccaggctggagttcaatggtgcgatcttggctcactgcaacctccgcctcccaggtttaagtgattctcctgcctcagcctcccaagtagctgggattacaggcatgcaccaccatacctggctaatttttctatttttggcagagacagggtttctccatgttggtcaagcaggtcttgaattcccaacctcaagtgatccacccaccttggcctcccaaagtgctgggattacaggtgtgagctactgcgcctggccattttttttttttttttgagatggagttgagcttttgtttcccaggctggagtgcaatggcacaatctcggctcactgcaacctccgcctcccaggttcaagcaattctcctgtctcagcctcccaagtagctaggattacaggcatgcaccacaatgtatggctaattttgtatttttagtaaagttggagtttctccatgttggtcagactggccttgaaatcccaacctcaggtgatccacccgcctcagccttccaaagtgctgggattacaggcgtaaggcaccgtacccagcctctgaagagctactatattttttgagtggccacctgacctgtttttatctgtcctgtaatagcagcattccaatttagttaaatgaaagacactaaaattaagcttccctgtaattatccatattggataaattaataagcatgtcagactaatatctattgtaacaatttggtagtgacttttctttggatattagatataaatatctaagtataaccaactttaatgtactagtcataatgtatgtagtattctaaaaaattgtttgtaaccatatttcagttaaaactactttatatttcaaagtatgagtaagaatattaaaataactatttaggctaggcatggtgattcatgcctgtaatcccagcactttgggaggccaaggcgggcataccacaaggtcaggagattgagaccatcctggctaacacggtgaaaccccatctctcataaaaatacaaaaaattaggccaggcgcggtggctcatgcctgtaatcccaatactttgggaagctgaggcgggtggatcacctgaggtcaggagttcgagaccagcctgaccaacatggagaaaccctgtctctactctaaaagtacaaaatttagccaggcatggtggcacatgcctgtaaccccagctactcaggaggctgaggcaggagaatcacttgaacccagtaggcggaggttgcagtaagctgagatcatgccattgtactccagcctgggcaacaggagtgaaactccgtctcaaaaaaagtaaatttaaggaaaaaaaaaaaatacagccggacgcggtggctcacgcctgtaatcccagcactttgggaggccgcagcgagcagatcacgaggtcaggagatcgagaccatcctggctaacacggtgaaaccccgtctctactaaaaatacaaaaaaatagccgggtgccctggcgggcgcctatactcccagctacttgggaggctgagccaggagaatggcgtgaaccagggaggcggagatcgcagtgagccaaaatggcgccactgcactccagcctgggcgaaagagagagactctgtctcaaaaaaaaaaaaaaaaaaaaaaaaaaaaaaaaattagccggacgtggtggcacgtgcctgtagtcccagctactccagctactcaggaggctaaggcaggagaatcgcttgaacccatgaggcagaggtcacagtgaaccgagatcgtgccactgcactcgagcctgggtgacagagtgagactccatcacaaaggaaaaaaaaacaaaaaacaccacacacaaaaaaaactacacagactccaaggttgagtttacacactgaactgttcttgcttttgcagtgtaagtacttcagcctgcaaatattagattaccttggattatcagttttctgtcaaagaaatttattcagtattttttagtttttaccattctgtatttctaaatttaattcgttcttcgtactaaacttctgtgtgctcttaaaatgagctttaatctaaacaaatctgtgtctactttaaaagactaaaaaaaaaattaaattttcccaaatcaaggataagcaatgaatctgaggtcttaaataaagacaatcttgagtcaaaagaatgccaaaagatttggctgttaatatgatttaaatatatttcaaaaaagcaataaaaatatctccatataatctaaatgctttaagataaaagagttgaacaagatagtctctcttattttcaggtaggataataaagcctctgatttatattttcttttacaacagccaggtctctggacatattgaactcttgaacatctgaatttcagtagacattggattcattgagctccgtctcaaaaaacaaaaaaacacaaaacctgacatcataaaagaacaagagaagaaaaagcaaactgacctctaagctaacagaggacaagaaatgaaaatcagatctgaactggagagttagacaaaaaaatgataaaaatatggagaaggctgggtgcagtggctcacccctgtaatcgcagcattttgggaggccgaggtgggcagatcacttgaggtctggagttcgagaccagcctggcaaaatagtgaaacccggtctctactaaaaatacaaaaattggccatgtgtattggtgggcacctgtaatcccagctactcaggaggctgaggcaggagaattgcttgaaccagggaggcggaggttgcagtgaggcggaggttgcagtgaggcaaggttgtgccactgcactccagcctgggcaatagagagagattctgtttcaaaaacaaaatgaaaaaaaaaaacaaaacaaaaaacaaacaaacaaacaaaaaaagaaatccaggagtaaaatctttgaaagaattaataagataaatagcactctagagagattaatgaagaaagagaagatccaaataaacacgattagaaatgacaaaatggccattaacactgacccaacaacaacaaaataattattcaagtctgtaacgaacacctctatgtaaacaaaccggaaaatctagaatagatcaattcctagacacgtacatcctccaaagactgaaaaaaaaaaaaaaagtatccctgaagagaccaacaagattcaaaattgaagtataataaatagcctagaaaccaataaaaaaccagaatcagacatattcacaaaagaattctaccagatgtacaaaaaaaaaaaagctgataccattcttactagagccattccaaaaaattgagaaggaactcttccccaactcattacataatagcattattctgataccaaaacctggtataaaacaaaaaaagaaaacttcatgccaatgatcttaataaaaaatgatggaaaaattctcaacaaaatactggcaaactgaatccagcagcacatcaaaaagctaatctactatgatcaagtagcctatatccctgggatgcaaggttatttcaacatacacaaatcaataaatgtgattaatcacataaacagaactaaagaccaaaaccacaagattatctcaatagatgcagaaaaatctttcaagaaaatttaacattcttcatgttaaaaccctcaacgaactaggcattaaaggtacatacttcaaaataatgagttatctgtcacaaactcaaagccaatacactgaatggacacacagaagttggaagcatttctctttgaaaactggcacaagacaaagatgccttctctcatcactcctattcaacatagcattggaaatactggacagagcaatcaggcaagataaagagaaagaaagtcagactactcttgtttgcaggtagcatgattctacacctagaaaaccctatagcctcagcagaaaattttttttttttaatttttattttatttttttgagacggtgtcttgctctgtcacccaagctggagtgcagtggcacaatctcagctcactgaaacctccacctcctggtttcaagcaattctccagcctcagcctcctgagtagctgggattacaagccacacaacaacgcctagctaatttttgtaattttagtagagacagggtttcatcatgttggccaggctgacctcgaactcctgaccttgtgatccgcccacctcggcctcccaaaattgctgggattacaggcatgaaccaccacgcccggctccagaaaagcttttaaactgacaaacaacttcagcaaagttttagaatacaaaataaatgcacaaaaatcagtaacatctctgtacatcaacaatattgaagccaaaagccaaatcaaaaacaatcctatttgccacaaaaagaatcaaatatccagaaatatagctaaccagggaggtgaaagatctctatgacaagaattttaaaactgcttcaaaaagtaagagatgatacaaacaaatggaaaacccgtttatgctcatgaatagaaaaggtatcattaaaatggccaaactgcccaaagaaatgtacagacttaattctgtttctgccaaactaccaaaaacattcttaacgggactaaaaataactattttaaaataaatgtggaactaaaagagagcctaaatacccaaggcattcctaaacaaaaagaacaaaactggaagcagtacattacctgacttcaaactataccacagggctacagtaaccaaagcagcatggtactgttatagaaacaaactcatagacaaatgcaacagaatagagagcccagaaataatgccacacacctacaaccatctgatcttcaacaaagcttacaagagaaatgtaaaaaaaaatttctatttaataaatttgctaaaataactagctaatactacgtagaaaactgaaactggatgcttttcttacaccatatacaaaaatcaactcaaagtgaattaaagtcttaaacttaaaatgtaaaattatttttaaaaaaactttggaaggtacctaggaaatcattctagacataagaaccagaagatttcatgatggagataccaaaagcaattgcaacaaaaggaaaaattgacaaatgggacctaattaaactacagagcttctgcacagcaaagaaaactatgaacagactaactaaacaagacaaccagccaggcgcagtggctcactttaggaggccaaggcaggcagataacaaggtcaggagttcgagaccagccgggccaatatggtgaaaccccatctctaccaaaaatacaaaaattagctgggcgtggtggcacacgcctgtaatcccagctactcaggaggctgagggagaagaattgcttcaacctgggagatggagggtgcagtgagccgagattgtgccactgcactctagtggggcaacagagtgagactccatgtcaattgaaaaaaaaaaattatgtggtaaacaattagtcatatgaaaacacttctaggaggtaccaagtttcatctcataaaatttagcattaaactcagaaatcaagatgataggatatagaatacagataatcacctctacaaatttaccctgcaaagagagtaactgatgtttttatgaatctgtgtaactcaccacttatataccacgttttcttataaaaatgtattaattttgtacagccaaataaaatagattttccctattcttttccttggtagcattctaaaagctaagccttggaattctgttgaaaatcacccagccataaaataaaagacacctgagaagattcctaaactcactctgggaaagagaaaggtaaatgataatttttattttattttatttatttattttttaaacagagtttccctcttgtcgcccaggctgagtacaatggcgcgacctcagctcactgcaacctcggcctcccaggttcaagcgattctcctgcctctgcctcccgaagtagctgggattacaggcgcctgcccctgcacccagctaatttttttgtatttttagttgagacgggatttcaccatgttggccaggctggtcttgaactcctgacctcaggtgattcacccacctcggcctcccaaagtgttgggattataggcatgagccactacacccaggctgtgacactgtagcacacatagccatggtggttatcttggtttatccctagacagtactgaaacccaggatcagaaaaaaaaaacaaaaacaacaaaatgaagtgtggctgaggaaaaatcacccacatttttcgaaaggaaaaacttgacctaaaaacattctgaaaaagtctctggctgggtgtggtggctcatgcctataatctcagcactttgggaggccgaggcaggtggatctcctgaggtcggcagtttgagaacagcgtgaccaacatggggaaaccctgtctctactaaaaatgcaaaattagccaggcgtggtagtgcatccctgtagtcctagctactcgggaggctgagtcagcagaatcgcttgaacccaggaggcagaggttgcagtgagctgagatggctccactgcagtcaagcctaggcaacaagagctaaactccatcttaaggcggggcgggggaaaaaaaagagtcctgtgcctagggaaaacaaaaagaaaaaagaggccaggcatggtggcggaggcgggtggatcatctgaggttaggagttcgagaccagcctggtcaacatggaaaaaccttgtctctaacaaaaatacaaaaattagctgggaatggtggtaggtgccggtagttccagctactggagtggctgaagcaaaagaatcacttgaatcagggaggcagaggttgcagtgagcagagatcacatcactgcactccagactgggcagcaaagcaacactgtctcaaaaaaaaaaaaaaaaaagtaaagaaaaaaagaaaaggaaaagaggcacagagatttttattttttacaaacagtgtaaggggattattttttgctttcttttcaatatggaaaatattttcaaatagaaaacaaaatttaggccggactcggtggctcacgcctgtaatccttgcactttgggaggccaaggcgggtggatcacaaggtcaggagttcgaaaccagcttggccaacaaggtgaaaccctgtctcaactaaaaatacaaaaaaattaaccaggcacggtggcaggtgcctgtaattccagctactcgggaggctgaggcaggagaatcggttgaacccgggaggttgcaatgagctgagattgcaccattgcactccagcctgggaaacaaagcgagaggaaggatggaagcaaggatggaaagatggaaggaaggaaggaaggaaggaaagaaagaagaaggaaagaagaaaggaaaatttatttaagtccatccaatgatttttcaaaaaataattaaaatatctgtatcaaaaatatacagatatctaaaatatctttatctaaaacgtatctctgtatctaaaatgtacactaaaaaaaaaaaaaaaatagcccggctcggtggctatttttaagtgctgtaatcctagcactttgggaggctgaggcgggtggatcatctgagctcaggagttcgagaccacctggccaatatagtgaaatcccgtctttactaaaaatacaaaaaaaattagctgggtgtggtggcaggcacctgtaatcccagctactaaggaggctgaggcaagaaaatcgcttgaatccgggagacggaggttgcagggagccgagatagcaccattgcactccagcctgggcagcaaaagcgaaagtccatctcaaaaaaaaaaaaaaaaagaaaaaaaagaaaaaatagttgataacgtgaattgcggagaagaaggtggcatttgggaatgtcagaaataaaggaaaatctagtttagtttttttttttttttttttccagagggagtttcactctgtggcccaggctggagtgcaatggcgcgatctcggctcactgcatcctccgcctcctgggttcaagcgattttcctgtctcagcctccctagtagctgcgattacaggcgcgcgccaccacgcccagctaatttttgtatttttagtatagacggggttcaccatattagccaggctgctctcgaactcctcacctcgtcatccacccacctcgacctcccaaagtgctgggattaaaggcgtgacccaccgcgcccggccgactctcctgtttctaatagaccaaaagagggactagaaatgccacggaccaaagctcttcctattcatgaaactgcatcacgagtcaggattctctcctgacgaccctcctgtggcccctgcacaatttgggagagacgccgcgttgcggctgcagagctgcccacagagggctgcaggccgggacacagtcactgcgcagagaagagacaggacgcccggggctgcctcccagagcagccgccatcttatggctgaaggggattgaggccgagctgggcaagaactccggcacgcgcagattgtggagctgactgcgggaaggcctgagtcacgccacagccccttccccctctcgggatgtcggaccggcactctcaccatttctaggcttccggggggtcctggcgtcttagctgtggatcccccaatacccgcaggtcacagagccacagaggctggacctctagcagcagaggacacagaagaacgaagacgagacgcagagctccaactgcagccagagacaaaggccccgccacatcccggaagccgccctgtcctctcctgccccgtgcctgattggacggtttccagcccagcgtccctgattggataacttctaaggtcctgcccccgcaaaccctgaatgaaagatgtgatcagacgctgggctgaaagaagaaagaatgacagcctaggctgccgccttttcaggcagggcttcctccctgagcagagcaggcccaacccagagggtatttgcctttaaccttgtgtataaggtcatcttcacttataagtaatatactatatggatactaaaaaatgaaaacaattgtttttgaatttcagcttttatgaccttcctggcttctggccctttgagtaggaagtattacaaacattgaatattttattatttatcctctgtggggtttttcttattcttgagagggagtctctgttacccaggctggagtgcagggtcatgactgcagctcactgcagcctcagcaatctaggcttgagcaatttacctgtctcagccttctgagtagctgggaccactggcatgtggccccatgctcagctaatttgttatcatatttttatttgtagagatgaagcctcactagatagcccagaatggtctcaaactcttgggctcaatgaatcctacaaagtcagcctcccaaagtactgggattataggcatgaaccatcacattcagactgaattattttatcaaaaaatttttttaaagcattgaggtccattaatagaattcaaggaaatgttatgcacatgttttaaaagcaaattaaaaagcatatacaaaaagagaacattttttaaaaaactaaatataggtaatgttaccagaaaaagtttagatctcctgactttaagttgcagtatgctaatggaatattcttagtggatagtattccattttcataagaaattcaaaacaagataatttccaggttttagaaactgatgtaaaacataaaaatatagaaaatctctaatgtgttcccatgatatagtattacttgaaatataaactgggcaaactcagcaaaagacaatttaatctcaaatttcaaaataggtacagaagttctaatggaataataaatggaatccaggattttattcataaaaaggctaaaaagtgaccattctctgtgattttgaaagtaggaatttgtgtaaacagatgtgtatttgcatctacatttgcctacacttactttttttttttttttttttttttttttgagacggagtcttgctctgtcgaccaggctggagtgcagtggcacaatctcggctcactgcaacctccgcctcccaggttcaagcgattctcctgactcagcctaccaagtagctggggatacaggtgcatgaccccatgcccagctaatttttttatgatatattcatttattcagattactcgataattaaaaattatattttctatgaataccagctaattttttgtatttttagtagagacagggtttcaccctgttagccaggatgtctcctgacctggtgaactgctcgccttagcctcccaaagtgctgggattacaggtgtgagccaccatgcccagcagcttttaaacattttaggaaagcatgagacatcaatcaatatgtataagatcttccttccctacctttttccttctccacctcctccttcctctctctctttcttggtttgatccagtaatgcaggacaacttgaggtgagggcttccaggtcataagtaaataagagataaaagtctggattcttgagtccttgataagcattcaactgaatacaatttagtctggctcagtgaacctgcatatctaaattaacagcagtgcagaggaagcaatcagatgtgcatttgtctcaggcgaggctcagagaaatgactctgagttctgtctgtctttggttctcaaggaatttccttgttggctaattgtaaagaaagtatgtagcttttttatctttgtagctatcttatttagaaataaaatgggaggcagatttgcctgacatagttctcaacttgacttttctagtggcttagtaattttggcatcaagagatttattttcctttagcagtggaaacctctttcattatcaagtgtagaggttaataaaaaaaactcataaacacaaatataattattgctacatctttcagaatagcccattctaaatttttttttttttttttggagatacagtctcgctctattacccaggctggagtgcagtggtgcaatctcagctcactgcaacctccgcctcctgggttcaagcaattcccctgcctcagcctcccgagtagctgggattacagatgtgcgctaccacacctggctaatttttgtatttttagtagagacggggtttccccatgttggccaggctggtctcaaactcctgacctcaggtgattcgcccgccttggcctcccaacgtgctgggattacaggagtaagccaccgcacccagggtagaatagcccatcctaatttaattctcatttactctagacttttttcataattttatagtggatcttaatgttggaggcattcaaaccagagcaactcaatcttgaatagcagctgtgtgaaatatgctgaaacctacttggctgcctccccaggttaggcattcttagtcacaggatgagataggaggtcagcacaagataaacaagatacactgcacttagaaatttgtcgtaatcttctctgttagcagggtgcaggcagaaacacagaatcacatatttagatcatggatgcagagatatgtcacaaagctcctgtggttagggtcaagaaaggagcttcccaccccctagatgttggtctcagcaatatatcacaatacccaaattatgtgagacccaggcaaaaaggagagtcacatcacctaggtgctgggtccagtgatatttcacaattatcctttgtagcaggttctagtcaaaaaaggagagtcacaacatttaagtgatgaagaaaaaagaatatgtcataatacctttctgaacagagcccattcaggagactcataatacctaggtgttggacccagccatatatatcacaatacaaaatgtatgcagagatcaggcaaaaaaaaaaaaaaaaaaaaaaaaagagatcacataacctaagagctgggcccagctacatatcacaagcaccccagtggacaaggccaaaacatgagagaagagtcacatcacataagtgcttgactaagcgatatgttacagtccaaactgtgaacacatcccaggaataagaggagtcacatcatctaagtaatgggcccagagatatgtcaaagtaactcctgtggagaggaaccaggcagaagaatcacatagcctgtgtgctaatcgcagcaataagtcactctcttttatgggagcatggccatagcaggaaagaagggtcaaattatttggtttctgggctcaaatatatgtcacaatctctcctatagggaaaagccaagtaagaaagtcacattatatggatgatgggttcacaaatatgtcactatgcccactatgggcagggttcaggcaggaggctcacattaccttagttctgggccaaacaatatgtcacaatgcctgatgaggaaagtgctgaggaaaaacgtaacttcatttttggtgtttagcccagcagtatgtcaaaatctacattgtgagctgaatgtaggtagaaaaagaagcatcacaacagctaggtgctggcccagtgataggtaacaattctttctgtaagcagcaacctggtagaaagagagtcacattacttgggtgatggatgcagatagattataatgcttcctgcaagcaggatccagcaaggaaagttacatcacctggatgttgcacatagcaatgtcacaatggcccatgaagatagggcacaggcagaagagtcacataaccagggtgtggggtccagtgatatgtcacaatgcccccctgtgggcagtgctgaggcaaaagtacagagtcacaccacctagatgttggattcagcaatgtgtcacaatccgatctgtgcactaggcaccaggcaggagagtcaaatcactcaggtgctgggcaaaggtgtatgttacaatcacagtcacaaaaaaatgtaggaatgaacaatcccacacatcccatttcttagtattagagtcaacacatgttgtatgttgagtccaagtacacaagtcacaatctcaacggtggactggatacatccatgagagcctcaatctttgccgtggactgtgtccccttagtggagtcacagcctcacaggtatgctgaatcttggtttgagagtcaccagcccacgtgtgaaccgaatccacgtttgagagtcaattttccaaccacctccaggtgtgagattcagaacttcaacagtgagctgtgttcatgtggaaagttgtcaattttcactgttggctgggtttgcatacgagtgtcacaatgtcacctgggtgctaggccctgttatagaactctctatactacctgagggctttatacaatatccatgatggtcacaatttgctctgagacttttttttctaatacaaactcataatcatacctgtggacctaggctcatgcattagagtcaacatctctccaattggctgggtctagagaaaagagttctcacctgcctatgagctaggtttagaaatgagtcaccatcttaactgttgtcacatgattacatatgacagtcacaatttttactgtggactccattcacgtgtgaaattcgtgtgagggtgacaatgctaacatttggtaggttgtgcatttgagaaacagtctcacctgtgtgcttggccctatgataacactctctgtaccgtccaaagactttatacaaaatgtgaaagaatggtaatccaggactttacctgtttctctaagtctagctaccagcaccagtatctctgctatggactggtttgtggtatgagtatcatcatcgcaactgtgaactgggctaaagtgtatgtcacaatctaacctgtgagtagaaagtaaatgggagagtaacatcacctgcatgctgagtcggaaatatgtcacaatttttcaggacaaggaccaggcaggagagtcatattacctggttgcctgtccagggttatgttacaattccttctcgaaagcaaggcacagacaacaaagtcacgttacttggtactggacccagctatgtcacaattctctctgcaggcaaggcctgggcacaagaaacacagcacctggttgctgaacccagagatgcaacacaatctttctctgggcatggtgcagatggaagaggagagtcacacctccaaagtaatggatgcacagatatgtcacaaggtgcttcccacagacagggcccaggcaagagctctttacccatttggtttgagccactgatgtgtcataatacccacaatacaaggggcccaggttaaagagagtgatatcacctagatacagagtccagtgatatgtcacaatcctccccttttacagggttcaggtagaagttacatcacttaggtgataaacaaatgacatgtcataattcctctattagcaggtgaagagagtcccatcacctaggtgttggactagccatattttaatatatacaatacacaattcaccaatacctaggtgaaacaaattgtgtatattgaaatatggcagggtccaacaactaggtgatgtgactctcctgcatgggccctgctaataggagaattatgacattatctttctgtttatcacctaagtgacgtgactctccttttctaactgaaacctgtagtaggagaggagagtcacatcaccaaggtgctaggcccagtgaaaaatcacaatccctggccaggcatggtggctcacacctgtaatctcagcactttgggaggcagaggctggtggttcaccaggtcaagagaacgagagcatcctggacaacgtggtgaaatcctgtctctaataaaaatacaaaaattagctaggtatggtggtgcatgcctgtagccccagctacttgggaggctgaggcagaagaatagcttgaacccgggaggcagaggttgcagtgagctgagatcgtgccactgcactccagcctggcaacaaagtgagactccatctcaaaaaaaaaaaaaaacaataaaataaaaaaatcacaatcccgccttgggcagaaaccaagcagtagacgagggtcacatcaccttgttactaggtcaaaaaatatggcacaatattttctgaaaaaaaggggaccgtgcagcacagtcacctcatctaagagagggctccagagatatgtcaaaatgccctatgtgggtaaggctcataaagaagagtcacataacctaggaattgagactagttatatggcacaatcaccccagtgggcaagactgaggcatggaacaaaattcagattatgtagatcctgagaaaagtggtatgtcaaaatctccactgtggacaagtttcagagacaaaaggagagtcatataatctagtttatgggcccaggcaaatgtcataatgtcctctctggacagggaccaggcagaaaaatcacataacctgtggtcagggcctagtgatacgtcaccccctcttctgtggtcagggcccaggcaggagagaagagtgagatcatgtaggtgcttggcacagatatgttacaacgtctcctagggaaaagcccatgtaaaggtgaagagtaacattaaatagatgggtccagaaatatggcaaaatgtcccctgaagccagggtctaggtaggagattcatatcatctgggtgttagatccagtaatatgttacaatagcccatttgggcagggcacagaaaggagaaacacattacctgggtgcagggaccagtgatatgtcacaatgccctctgcgacagcaccaaggcaagagtatagggtcacatgatctacatgctgggtccagcgatatgtcacaatcccatctgtgtactgggcccaggcaggagagtcaaatcgctcacattctgagcagaggtatgtgtcacaatcacacctgcagaaagacccagaaatcagataaaacagttcttcacgtgtcttcattctaggtatgagtcaataccatttggatattgggtctaagtacacaagtcaccatctcaatgtagatgaatccatgcataacaacctcaatctcttctgcggactgtgtctcttagtaaaatcatagccttggccaggcgtggtgcctcacacctgtaaccccagcactttgggaggccaaggcaggtggatcacctgaggtcaggagtagagaccagcctggccaacatggcaaaatctcatctctactcaaaatacaaaaattagctggatatggtggcgggcgcctgtaatcccagctactagggaggctgaggcaggagaatcacttgaacatgggaggtggagtgagccaagatcatgccattgcactccggcctgggcaacaagagcgaaactcggtcttaaaaataaaaaaataaaacagcctcacaggtgtgctgaatcttgacctgagagtcaccaatccatctgtggaccagattcacctataagagtcaattttgcaattttccactgcctccaggtgtgacattcagagcttcagaagtaggttatgtttatgttaagggatgacaatatttactgttggctggttgcgcatatgagtataacaatgtcacctgtgtgctgggccatgtaagggcactcagtgtattacccgagggctttatacaatatacaggagagtcaaatccactctgagatctttgtgattgtataaaaccatgatcgtacctgcggccctaggcccagactggggcaggtggatcatgaggtcagtagttcaagaccagcctgaccaacatggtaaaaccttatctctactaaaaatacaaaaaagccgggcatatcccagctgctcagaaggctgaggcaggagaatcacttgaacctgggaggtggaggttgcagtaaggtgagctcgtgccactgtactccagcctgagtgataagggagactctgtctcaaaaaaaaaaaaaaaaaaaaaaaaagatacacaaaacacaatttcatctgtgtttttggcttgtgatgacactctgtgccacctgagagctttttataatatctgagagagtggtaattctccatgacctttgcaaaaaaaaaggaaacttagaatcatgtttgttttctcaagcctagctaggcaaggtgtatctcttttattgcctggttcaaggtatgagaatcatcatagtaatttgtaagctcaggcaaaatatatgtgacaagggccgggaaggtggcttacacctgtaatcccagcactttgggagaccgaggcaggcggaccatgaggtcaggagatcgagaccatcctggctaacacggtgaaaccccgtctctactaaaaatacaaaaaactagccaggcatggtggcagacacctgtagtcccagctacttgggaggctgaggcaggagaatggcatgaacccagcaggtggagcttgcagtgagccgagattgctccactgcactccagcctgggcgacagagcaagattccgtctcaaaaaaaaaaaaaaaaaaaaaaaaaatatatatatatatatatatatatatgttacaatgttacaattacacctatgggtaaagagtgagcaggagagtcacatcacctggggctggtctagagatatgtcacaatcttttttgagtgcaaggacgagacaggagagtcacatcacctaggtgcttgggcagggatgccttaacatctcttcttgtaagatgggcacgggcagcaagttacaccacctgggtgcagggcccaacaatatgttacagtgctctctatgagcaataccctgagaggtgagacacattatctggttgctgatcccagtggtatgttacaatgtttttggggggcatggtgcatgtaggtgagaaaagtcacatattataattgatggatgtcaaaatatgtcacaaggccccctgtgggcaggcccaggcagggacctcccatcccctaatgtcagactcagtaatatgtaacaatacccaaaatatgcaaggtccaggcaaaagatgagagttacgtcatctaggtgctgggtccagtgatacatcacaatcctcttttggcagggtgcaggctgaagaagagtcacatcacctaggtgatgaatgaaaagatatgtcataatactctcgtgaccagggcttatgtaggagactccttggtgatagacccaggtacatgtcacaatatgtatgcaggggccaggcgcagtggctcacgcctgtaatcttagcactttgggaggccgaggcgggcagatcacctaaggtcgggagtttgtgaccagcctgcccaacatggagaaaccctgtctctactaaaaatacaaaattagccaggtgtggtggtgcatgcctgtgatcccagctacttaggaggctgaggcaggagagtcgcttgaacccaggaggcagaggttgtcatgagccgagattatgccattgcactccagcctgggcaacaagagcgaaactctgtctcaaaaaaaaaaaaaaggatgcagggcccagacaagagaagagtcccatcatgtaggtgctgggcccagtgatacatctaaatctttttttgttcagagtccaagcagtagagaagaagtcacattacctaaatgctgcatccagcaacatgtcacaatacccggataaggagagcccaggcagaaaagtcacatcacctaggtgaaaggcccaggggtatttcctagtgctacttgtttgcagagctcaggaagaagacaagagtcagataacgtaggagctggtagcacaatcactacagtgggcagggtctagctatgagaggagagtcacatcgcatgggtgctgggccaagcgatatctcacatttcttactgtggacagattcagaaataaaaaggagacctattatttaggtgattggcccagagttatgtcacaatgaccacctgaacagggaccaagcataagaatcacatcacctgtgtgctgggccaaacaataagtcactctcttttctgttagcacaacccaggctcaaagatatattacaatctgacctatggacaaagcccagataaaagaggagagtcaaataaaatagttgatgagcttagatatgtgttaaaatgttttctgtaagcatggtccaggcaggaaactcacatcacttgggtgtaaaacccagcaacatgtcacaatgtcttatgtgagcagggccaagaaaaaaatagagtaacatcactttgatgctgggttcaccaatatttcacaatcttccctggaggaaaaactaagaaaaaaaaatcaaatcagctatgtgctgcaaaatgtcacagaacttcctgtaagcagaaaccaggtaagacaagagagtcaaatcacctgtgtgactggtgcaaagacatttcaaaatgccacccctaggcagggtccaggcataaaagttatatcacctggctgttggacccagcaatatgtcacaatggcccaagtggccaaatcgtaggcagaagactcacatgtcagtgcagggcctagcaatatttcataatgtctgctgcaggcaaaacctaaaaccagggaaaaatcccatcaggtaggtgctgggcgtagcaatatgctacaatgttcctgtaagcagggaccagacagaagaagactgtcacatcacctggatgctgggcccagagatatgtcaaccatcatttctgtaataaagacccatgcagaaaaaacacagcatctggttgctggccacagcaatgtgcctcaattttccctgtaggcagggtgcaggcagaagaggagagtcacatctcctagttgatgaatgcagggacatgtcacaatgctccctgtgggaagggcccaggtaggagacttccgacctttaggtgttcagctgagcattatgtcacgatacacaaatatgaagggcctaagaaaaataagagtcacatcaccttgatgttaggtctctgtgagcagagaccaggcaggagaagaaagtaacattactggtcaggcgcggtggctcacacctataatcccaatactttgggaggctgaggagggtggatcacttgaggccaggagttcgagaccagcctggccaacatgctgaaaccccatctctactaaaaatacaaaaattagctgggtgtggtggcacatgcctgtagtcccagctactcaggaggccaacgcagaagaatcacttgaacctgggaggcggaggttgcagtaagccaagatcacaacattgcactccagcctgtgcaacagagtgagactccgtctccgaaaaaaaaaaagaaagtaacatcaccatggtgacgggcatcattgagttacatcacaaagctccatgtaggcagggtccagagaaaaggtgttacatcccctgggtattggacccaacaatatgtaacaatttcttttttatttttattttttgagacagagtctcgctctgtcacccaggctggagtgtagtggcgcatcttggctctgcaacctccatgtcccgcaattctcctgtctcagcctcccaagtcactgggactacaggcacacaccaccatgcccggctaatttttgtatttttagtagagacgtttcaccatattgatcagactggtcttgaactcctgacctcaggtgatgcacccgcctcagccttccaaactgatggcattacaggcgtgaggccactgtgcccggccttatatgtaacaatttgttgttgttgttgttgttgttttttgagacagagtcttgctctgttgcccaggctggagtgcagtggtgtcatgtcggctcactgcaaccactgcctcccagattcaagtgattctcttgcctcagcctcccaagtagctgggattacaggcatgcgccaccacacgtggctaatttttgtattgttttagtagagatggggtttcaccatgttggccaggctggtcttgaactcctgaccttaactgatccactcatctcagcctcccagagtgctgggattacaggcatgagccaccatgcccggccatatgtgacaatttctaatgtgacatattgtgccataatatggcacaacatgtagggcacaggtgagagagtcacataacatgggtgcaggattcagtactattttacaatacccaaaatttgtgaggtcccataaaaagaggagagtcatatcacctaggtgctgggaccagtgatatgttacaattttacctttgggctgggaccagacaggaaactgaaatcactcaggtgctggccaatgtcacaaccacacctgcagaaaggtccagtgatcaattaatcccgtacaggtcccagttctaggtatgagagtcaccacattctctatgttgggtctaagtacgctagtgacaatttcaccaatgaattgaacctgtgcataagagcctccatctctcttgtgagctgtgttcgctctggccctcagcccaggtatgagtcaacatgtcctcaggaaggtagacttctcattggttcagattgaaaaattctcacctatgaactagatttagaaatgagtcatttttcaaactcctgcggaatgttcacatataacagccacaattttaacggtggactgtgtctgtgcatgagattcaggacctcaccagtgggctccatcactgtgtgagggtgacaattctaacggttggtggggtgggcaaagaagaaacacaatctcacctgcttgctgaactctataatgacactctctgtaccacgagagatttatatagtattcaaaacagtggtaatttggctgggcacggtggctggcgcctgtaaccccagcactttgggaggccgaggcgggtggataacctgaggtcgggagttctagactagcctgaccaacactgagaaaccccgtctctactcaaaatacaaaattagccaggcgtagtggcacatgcctgtaatcccagctactcaggagactgaggcaggagaatcgcttgaacccaggaggcggaggttgcagtgagccaagatctcgccattgtactccagcctggacaacaagggcaaaaccctgcctcaaaaaaaaaaaaaaaaaaaaaaaaaaagtggtaattctcagttgggcatggtagctcatgcctgtaatcccaacacctggggaggccgaggtgggtggatcacctaaggtcaggagttcaagagcagcctggccaacatggcaaaatcctatctctactaaaaatataaaaattgcccaggaggcggaggttgcagtgagctgagattgcaccactacactccagcctgggcaacataaacgaaactccatctcaaaaaaaaaaaagtaattctctatgacatttgtacaagaaagagacccaggataatactcataaccctaagcctagctataagaggcagcatctctcttactggctggttgagggtagaagagtcataattgcacctgcaaactgggccaagctatatttcacaatcccacctgtgaatagggagagaggagtcgcatcacgtgcgttttgggtcaggaatatgtcacagtcttttctgagggcagagaccagacaggagtatcacatcacctgaatatttagccaggaatatgtaacaaacttcctctgaaagcaggacacaggcagcagagtcacatcacctgggtgctgagcccagcaatggataacaatgctctctgtggtccaggcccaggcaggagagacacattacctgagtctagtgataagtcaaaatttttcctgtaggcagagtgcaggcaaaaatggagagtcactctcctaggtgattgatgcagagatatgtcacaaggccctctgtagaaagggcctgggcagggccagacacggtgggtcacacctgtaatcccagcacttcgggaggccgaagcaggtggatcacgaggtcaggagttcagaccagcctggccaacatggtgaaaccccatctccactaaaaatacaaaaattagccgggcatggtggcaggcacctgtaatcccagcacttcaggagactgaggcaggagaatcatttgaacctgggaagcggaagttgcagtgagccgagatcgcaccactgcactccagcctgggagacaaggcgattctctgtctcaaacaaacaaaaaaagaaaaagaaagggcctgggcaggagcctcttattgtataggtgttagacctagtaacatgtcctaacgtccaaaatattcagggactaaggaaaaaaggagagtcacataacctgagagcagggcttagcaatatgtaacaatgcaccttgtggacagtgccaaggcaagaaaaaagactcccatcacctcagtgaaaggcccagctatgtgtcacaatgccatctgtgggcagcaccaaagctggaaaaaagtcacatcttcaaggtgcaaagtcaagcgatatgtcacaatctccatctgtgggctgggccaaggcaggagtcaaatcactaaggtgcttagtagatgcatgcaatcttacctgcaggaaagtccaggaatgagattagaaattccacacatgtccaggttccaggtatgagggtcaacacctcctgtatgttgggtctgtctaagtacgtgagtcacaatctcaatggttgacggtattgcaagagagccacaattttgtctgcggactgtgcttttcagtgcagtcacagcctcacatgtgtactgaatcttggtctgagagtaaccaacccacctgtggaccaggcccgcatatgaaagtcaattatccaacttttgacagcctccgagtgtgagattcagaaatgttcctaagaggccgggcgcggtggctcacgcctgtaatcccaggacttttgggaggctgaggcgggcgtatgacctgaggtctggagttcgagatcagcctggccaacatggtgaaaccccatctctagtaaaaataaaaaaataaataaataaaaattagccgggcctggtggtgcgcacctgtaatcccagctaatcggaaggctgaggcaggagaatcgcttgaacctggaggcgaggttgcagtgagccgagatcgcgccactacatttcagcctgggcgacatagcaagattccctctcaaaaaaaaaaaaaaaaaaaaaaaattaacaacagaaactgaagaccccagggccgcagctcctcctgcgcacacaccgagtcgggattctgccccgatcatccgccgggcatccctgaacaatctgggaaatactcggggctgctggtgcagagctgaccagagagctccagacagggtaccgcgcaggaatggggcgggacgcgggaggctcggctgcgggcccagccgccatcttgcggccagaggggcctggggcggagctgcgccagcgaccaggactcaggagcggactgtgaggaggccggtcccgccactttcacagcctgctctcccctctcgggatgcctaaccccgcacactcaccatttcccagcttccaggatgtccgggcatcttagctgtgcgtctcccaggacttgcagatcacagggtaacggaggctgcgacaaagtcaccggggattcccgagttggagaacgcggaaaagcagaggcgggtcccaaggtctagcgggagctggagacaaaggccccgccaaaagccggaagccacggccccctctccaactgcgcgtctgattgggtggttcccacgccagcgccactgattggataaagctccaggacccaccctccctagcgtttgcgcattttatggacagggaaacaggctcaagtaggcggggcacatgcccagggaattacagctaatcaagtgagctgagccttgaaatgcacttgcttttttccttccctgggtcagcttgtatagtgcatcttagtagctactgaaggggaagaaacagaacatttggatacccttttaacaactttttaattatgttgacaatgcagcaaagaccctcgtcccatccctgagggtctctctcaccgtgctgtaccacactgctgtacacatcttgggatgaccattaggaacggggaagcagctggggctagggatagataaacatgaattatgttgcctaaatttgctcattttagaaaaacatctaaaccaatctctgtgaagtggctattatcagggtaattgtgccctgactgtgctacatctcaatctgacttctctttttttaaaataactgcattactctcattaacggggttatttcactttctattggaaaatcgccaattgtcctctgtaggtgtcctgatgtaatttgctagtttagaccctggaggtagggataagaaaatacttgagctacatcagaacacctaactcaactggaggatatatagaaattccttaataatatctaacagttttctcaatacccattatatttaacagtgatagcttggagggctgagaggtgaaacagatgacacaaccttagaagttcacttttgttgccggcgtggtggctcacgcctgtaatcccagcactttgggaggccgaggcgggcggatcacgaggtcaggagatggagaccatcctagccaacatggtgaaaccccgtctctactaaaagtacaaaaaaattagccgggcgtggtggagcatgcctgtaatcccagctactcgggaggcagagccaggagaatcccttgaatcagggagttggaggttgcagtgagccgagatcgcgccacagcactctagcctagcgacagagcgagactccgtctcaaaaaaaaaaaaaagattgtcttcatccaagccagtttccatttcttggacacacattgctggtcagccaatcagatgctggtattgaggtgaaaacagaaacgatttctgcctctggattctctgagattcgtgggaaaaatggtatccctaaaaaacaaagcaagacacaaaaacctgaccccggtgagatggtgcaagaacttgcaaagtaaaatgcacttggaaactccctgggacatagtgcagtgtctcctgagaggtcataaaagaggtgggtttcagaaaataaatctaatcacgcattccatttgtttaaaattctcatttaccctttttttttttttcctgtaaggtgtgttttttatggctgagtgaatttcaaacagaattccaaggcttatcttttaaaatgctaccaaagaaaagaataggtaaaatatattttccgttttggctgtaaaaaatgcatacattaaaaaaaaagtggtagataatgggcaagttacaagattcgcaaaaacatcagttcctctttgtgcagggtaaatttgtgacattgactatacctgttctacatcctgttatcttgatttctgggtttaatgtcaaattttgtaagatgaaacttggaacctactaaaagtgttcccatatgactaattactacatgatttttaatggaaataatataataacacacttattgtctgaaaggaatagatacttttgcttttcttactgaggtatgaaatgtaagcaccttaaaatttcctctttttttttgtggcagagtctcgctctgtcgcccaggctggagtgcagtggcacaatctcggctcactgcaacctttgcctcccgggttcaggcaattctcctgagtagctgagattacaggtgcctgccaccatgcctggctaatttttgtatttttagtagagatggggtttcgccatgttgttcaggctggtctcgaactcctgacctcaggtgatccaccctccttggcctcccaaagtgctgggattacaggcatgagccaccgcacctggtctcctttttttatataaacactgtttgggtaatttcgctggatttttcaaacacttaaacttccaaaaaccaagtgaataactctgacatggaaattaaagcttgcacccagtgactccaagctaaagctaatattgatcctgcaataggaggttattaaaggcccagtttgttcttccttgggagcttcctgggcagatgtccaagtcctgaaagaagactatatactgagagaagctacagagccctggaaagctggggacccacaggcagatgcatttaaggttaagatggaaggggactgacatactcttttttttttttttttttttttgtgagacagagttttgctcttgttgcctaggctggagtgcaatggcgccatctcggctcactgcaacctctgcctcctgggttcaagtgattttcctgcctcctgaatagctgggattacaggcatgcaccaccacgcccagctaattttctatttttagtagagacggagtttctccatgtgggtcaggctggtctcaaacttctgacctcacgatccacgtgcctcggcctcccaaagtgctgagattacaggcatgagccaccgcgcccggcctgaaagattctttttttttttttttttttgagacagagtctcgctctgtcacccaggctggagtgcagtggcacactctcggctcactgcaacctccacctcccgggttcaagtgattctcctgcctcagcctcctgagtagctgggactacaggcgcgtgccaccacgcccagctaattctttgtatttttagtagagacggagtttcacagtgttagccaggatggtctcgatctcttgaccttgtgatccacccgcctcagcctcccaaagtgccgggattacaggtgtgagccaccgcacctggccccctgaaagattcttcctgaagataatattgttcttgttttgaggccgtttctaaaagttgtaaaataaaacagatttatgtagaataatttaaaatccaaagaagtattgaaacaggaagaagtactaattataagagcattaaggattgcaaaggataggcagaccagggctttctttcatagggaggagcaaacaagatttaaagataaggtaggaggagaatggcaaatggagagtgaaaaaaatcagattctggttcaggagaatcttaggagggacataaaatgggattgtattttggctcagactgagggtagggtagcttaaagttcaggagtctgtgggaaagaaataaacttaagtgaggtttgatttagaagtagtttattttgactgctgaagacaaatttagctgattttttaatgagaacaaggagaaaatgtgcagagcctatttctggctatgtggtagcaccctgtaattcataattggaaaggaatttatgttcttcgtctttccccaccttttttttattctgtacattttttccatttcagttttcctgagttgtatcttatataattaactggtcaccataactgcagtgttttgctgagttctgtgagtagctctatcaaattatttaacttgagggaggttatggaggtcctcactttttcaaaagtacctcagaagcatagataagcccgtggggtttgtgagtggcatctgcactaaggaaaaacttatggaaccgaaccctgaatcagggtctgtgttgattctgggtggtatcagaattcaaatgttagacaataggttggtgttggagaattgcttggtgttcagcaaactctataggtttgccagaaaaacaatataatagagacctggcctggaataaaactctgggtgtctggaaatggaaagctctgctctcctgtacacaggctgtcacactgcccattgtcctgtgattccaggtctactaccagtatgagagaagactgaaaacttagaagaaaactactttggccaggcacggtggctcatgcctgtaatcatagcactttaggaggccgaggcaggcggatcacgtgaggtcaggggttcaagaccagcctgatcaacaacatagtgaaacccttctctagaaaaatacaaaaattagccaggtatggtggcgggtgcctgtaatcccagctacttcagaggctgaggcaggagcatcacttgaaccggggaaggtggaggttgcagcgagccgagattgtcgtacctgagcgagttagcaaaacgccacactttgagacgaattaagagtcctttattcagccggcggccaaagagactgctaaagctcaaaattctctcggccccgaggaaggggcttgattaacttttatactttggtttaggaaagggaggggagcttaaatgcaacaactcttcagaagtaaaaacatgcaagaaattaaaaggacaaatggttacagagaaacaaacaacttaaaagacaaatggttacaaaaaaagcaaaggtaccaggtgcggggatctaaatccttcataagagttagatatgggcactactccggacacaaactcaaggctttatggtgttatcttttgagcaaaatcctgggaacttcatacatggtttgtttcggtaccttatcagttaattgaattcttttgatatgttgagaatctgtttacacaagttaactccttgaagaagggggtgggtaaggagtccttaatgtcttgtaaatcacgggggccagatggagttcgtccagcttttctcagctaagggagagtttattcatgtggaaacaagtctaggtgattaagggagcaaaagagagagtctaaaaacagggttagtaaaaacaaggttgggcattataacacttggctgtagggtggacccagtgcaccactgcccacagccactggctggcttctcagttgagccaccagtttgatcacatatgggctgtgagctgcaggtgttacacttggccaccagctccaaatattgaaggtcgaccttaatatttaatatcaaacatttaaatatttacacgcagtagtgtctcctaggtccagcagagggctgtgatcatggctcgctgaggcctcgaacccactcccctgccctagggctcgcccacgtgggcctcccatttccctcttctgaggagctggggccccagtgatcttcctgtgatttttttttctagttccacttccattttctttttgcatcactttagttgttgttttcctttgttctctgtctctttatgctccttcctgcacactaaagttgttgttttaatttctttctttcttcttctttttctttcttttttctgagtgaagtcttctcactgtcatgcaggctagagtgcagttgggcaaccatagctccctgcagcctcgacctccctggtctcaggggttgctcctgtctcagcctcccaagtggctgaaactacagggatagcttgatcacgccactgccctacagcctgggtgacagaagaaaaccctgccagagggagatggggggtacagttaattaggatcttatttacctttgttcactccgttaaaaaaattttaatattgtttgttctttctttgtcacttgttactgtttgtttttattattattattatttatttttatttttagacaggttctcactttgtcacccaggctgcaatacagtggtgtgatcttaactcacagcagcctcaacctcccaggttcaagcaatcctctcatttcagcccccacactccccagtagctgagagtacaggcacacaccacccgccactggctaaccttactttgtgatttgtacattttatttttgtagagatggggttctgtcaggcctctgagcccaagcctgcacatatacatccagatggcctgaggcaactgaagaacaatgaaagaagtgaaaatggccagttcctgccttaactgatgacaatccaccattgtgatttgttcctaccccaccctgactgatcaattaaccttgtgacattccttctcctggacaatgagtctcagaagctcccttaccgagcaccttgtaatcccccccaccccgctgcctgcaagagaaaaattccctttgactgtaattttccactacctaccccaatcctataaaactgccccacccctatctccctttgctggctctgttttcagactcagcccacttgcacccaagtgaaataaacaaccttgttcctcacacaaagcctgttggtggactctcttcacacagatgtgtgtgtcatttggtgctgaagacctgggacagggggaatcctttgggagactggtcccctgtactcaccctcactccatgaggagatccacccatgacctttggtcctcagaccagcccaaggaacatctcaccaattttaagtctggtaagcggcctcttttttttctcttctccagcctttctcactatccctcctttcccttcctggtagaaacagaggagaggcattttattcgtgaactcaaaaccctggcattggtcacagactgaggaagacagtcttcccttggtgtctaagtcactgcagggacacctgcctgattattcacccacatttcagggacgtctgatcactgcagggatgcctgccttgatccttcaccttggtggcaggtaccacctccccttggtggcaagtaccacctcccctagatggcgagtaccacgccccctctctccatgtctctaccctctcttttctctgggcttgcctctttcactatgggcaacattccattctccattcccccttcttctcccttagcctgtgttcttaaaaacctaaaactccttcgactaacacctgacctaaaacctaaacatcttattttcttttgtaatactgcttggccccaacagaaactcgataatagttccaagtgggcagagaatggcactttcaatttgcctatcctgcaagacctagacaatttttgtcataaaatgtgcaaatggtctgaagtgcctgacttccaggcattcttttacacatcagtccctccctagtctctgctcccaatgcgactcatccgaaatctttcttctttctctcctgtctgttccttcgatctccaccccgagctctgagtccttggaatcttccttttctatggacccatctgacatctcccctccaccccaggccgctcctcaccaggctgagccaggtcccaattcttcctcagcttccactccccaaccctataatccttctgtcacctcccctcctcacacccagtctgacttacagtttcattccatgactagccctcccccagctgctcaacaatttcctcttaaagaggtggctggagctaaaggcatagtcaagattaatgcccctttttctttatctgacctctcccaaatcagttagtgtttaggctctttttcatcaaatgtaaaaacccaacccagttcatggcccatttggcaataacccttagacactttacccccctagacccagaggggtcagaaggccatcttattctcaatgtacattttattatccaatccactcccaatattagaaaaagctccaaaaattagattccagccctcaaaccccacaataggacttaattaacctcacctttgaggtgtacaataataaagaagaggcagccaaatggcaacatatttctgagttgcaattacttgcctctgctgtgagagaaaaaccacagccacatctccagcacacaagaccttcgaaacacctaaaccgcagcagccaggcattcctccaggacctccttccccaggatctccttccccagcatcttgcttcaagtgccagaaatctggccactgggctaaggaatgcctgcagtccaggattcctcctaagccctgtctcatctgtgtgggaccccactataaattggactgtccaactcacccagcagccactcccagagcctctggaactctggcccaagactctctgactgactccttcccagatcttctcagcttagcagctgaagactgatgccgcccaactgccttggaagcctcctagaccatcacagacactttgggtaactcctacagtggagggtaagtccatccctttcttaatcaatacagaaactacccactccacattaccttcttttcaagggcctgtttcccttgcatccataactgttgtgggtattgatggccaggcttctaaacctcttaaaactccccaactctggtgccaacttggacaacattcttttatgcactcccttttagttatccctatctgcccagctcccttattaggtcaagacattttaactaaattatctgcttccctgactattcccgggctacagccacacctcattgtcacccttttccccagttcaaaacctccttcacatcctccccttgtgtctccctaccttaatccacaagtatgggatacctctactcctaccttggtgactgaccatgcacgccttaccatcccattaaaatctaatcacccttacccgactcaacaccaatatcccatcccacagcaggctttaaaagtgttaaagcctgttatcaccaacctgttacaacatggcctcttaaagcctacaaactctccttacaactctcctattctacctgtccaaaaactggacgagtcttacaggctggtccaggatcgttgccttatcaaccaaattgtcttgcctacccatcctgtgatgccaaacccatatactctcctatcctcaatacctctctccacaacccattattctgttctgtatctcaaacatgctttctttactattcctttacaccctccatcctagcctctctttgctttcacttggactgaccctgacacccatcagcctcagcagcttacctaggctgtactgccacaaggcttcagggacagccctcattacttcagtcaagccctttctcatgattactttctttctatccatctgcttctcaccttattcaatattttgccgaccttctactttacatcccctcctatgattcttcccaacaggagaccctcctgctcctccaacatctattctcaaaaggatatcctcctccaaagcccaaatttctttatcttctgttacctatcttggcataattcctcataaaaacacacatgctcttcttgctgattgtgtctggttaatttcccaaaccccaaccccttccacaaagaaacaactcctttccttcctaggcatggttagatacttttgcttttggatagctgcttttgccatcctgactaaaccatgtaaactcacaaatggaaacctagctgacctcatagatcctggatcctttccccactcctctttccattccttaaaaacagccctagaatctgctcccacactagctctccctaactcatcccaacccttttcattaacacagccaaagtacagggctgtgcagtcgaaattcttacatgagagccaggactgcaccctgcagcctttctgtccaaacaacttgaccttactgttttaggctagccctcatgtctctgtgcagcagctgctgccgctttagtacctttagaggacctcaaaatcacaagctatgctccacttactctctacagttcccataactgtcaaaatctattttcctccttgcacttgatgcatatattttctgccctctggctcctttaactgtactcactatttgttaagtctcccacaattaccattgttcctggcccagacttcagtctggcctctcatcttattcctgatactacacctgaaccccatgactatgtctctctaatccacatggcattctccccatttccccatatttccctctttcctgttccccacccagactgcgcttggtttattgacagtagttcttccagacccaatcgccaatcaccagcaaaggcaggctatgctatagtgtcttccatctatcattgaggctatttccctgtccccttccactacctctcaacaagctaaactcattgccttaacttgagccctcattcttacaaagggactacatgtcaatattgatactgattccaagtatgccttccacatccttcacctccatgctattacatggccagaaagaggtttcctcactacacaaaggtcttcaatcattaatgcctccttaataaaaacttttcttaaagctgctctacttccaaagaagctggagtcattcactgcaagggccatcaaaagatatcagatgccattgctcagggcaatgcttatgctgataaggtagctaaagaagcaactagcattccaacttctgtccctcatggccagtttttctctttctcatcggtcactcccacctactctcccatggaaatttccacctatcaatctcttcccacacaaggcaaatgattcttggaccaaggaaaattcttctttccatcatgacaggctcatttcattctattgtcctttcaaaaccttttctatgtgggttacaagccactagcccacctcttagaacccctcatttcctttaagacatttgccctgcatttcactccatcattgactaccttcccctttttcttccgactctcctcccagccccctttcttgtttgcttatacccaaccctatgaatagcaatgaaaggtttcttgtaaacagtatgcactttctcatacaccataaaaattgaacctcccccactacccagttgccttatcagtccccattacaacctttaatggctgctgccctcactagatccctaaaagtctgggtgcaagatacctcttttggtgctccaattttgcctcacaacggtctcttcttcctctgtggctcctccgcctacatgtgtctacctattaattggacaggcacatgtacgttagttttccttatcccaaaaaaatcaatttgcaaacaggaccgaacaactttctgttcctctcatgacatcaacacttcaccacaattttcttttatttttctgattaatatgagaagacaggagtaggcctcggcttacttactgctgaaaaaggaggactctgcatatttccaaatgaagaatgttgtttttacctaaatcaatctggcctggtatatgacaacatacaaaaactcaaggatagagcccaaaacttgccaacgaggcaaataattatgctgaacccccttgggcactctctaattggatgtcctggctcctcctaattcttagtcacttaatacctgtttttctccttctcttattctgaccttgtgtcttccatttagtttctcaattcatacaaaaccacatccaggccattaccaatcattctatatgataaatgctccttctgacaaccccacaatatcaccccttaccacaaaatctttcttcagtttaatctctcccactctaggtttccacactgcccctaatcctgcttgaagcagccctgagaaacattgcccatcatctctccatacgacctccaaacatttttgccaccccaacacttcaccactattttgttttgttttttcttattaatataagaagacaggaacgtcagacctctgagcccaagcttgcttgtatacatctagatggcctgaggcaactgaagtatagccagattttagggaatcagagagactgatgaggttcaggaggatatttattaattactttggttcatcagcccagacggattaacatccaaaggactgagccctcaacaaagagttaagttagcttttaggcattttgtgggtggggggagatctgtgcaggaggaatcatactacagaagtgagaaacaaagacagttattttgttgagacatgcattacatcatttcttacttttcaaggaaaaccatgttttgcgacttgagtttatctgtctagtgaccttgcagcttcacagctatggaatcagggtcttcacaatgcctgggaagtgaggaaagataaagctcactagcgatggaaaaacaggcagttagtttttttttttttttttttttatgttctgatcttatttatttatttatttatttattgttgtgggtacatagtagtatatatatttatggggtccatgagatgttttgatacaggcatgcaatgagtaataatcacattatggagaatggggtatccaccccctcaagcatttatcctttgtgttataaacaatccagttacacacttttagttattttaaaaatgtacaattaagttattattgactatagtcaccctgttgtgctataaaatagtatgttttatacattctttctagctatttttttctgtacccattaaccattcccacctccctcccacccccactacccttccctgcctctgataaccatttttctactctctatgtccatcatacattctgattttaaaacggttttcctacatttcatacataagtcactcaagtacacagaattattattttttttttaaatttatttttttattgataattcttgggtgtttctcacagaggggtatttggcagggtcatgggacaatagtggagggaaggtcagcagataaacaagtgaacaaaggtctctggttttcctaggcagaggaccctgcggccttccgcagtgtttgtgtccctgattacttgagattagggattggtgatgactcttaacgagcatgctgccttcaagcatctgtttaacaaagcacatcttgcaccgcccttaatccatttaaccctgagtggacacagcacatgtttcagagagcacagggttgggggtaaggtcacagatcaacaggatcccaaggcagaggaatttttcttagtgtagaacaaaatgaaaagtctcccatgtctacttctttccacacagacacggcaaccatccgatttctcaatcttttccccacctttcccgcctttctattccacaaagccgccattgtcatcctggcccgttctcaatgagctgttgggtacacctcccagacggggtggtggccgggcagaggggctcctcacttcccagtaggggcggccgggcagaggcgcccctcacctcccggacggggcggctggccgggcaggggggctgatccccccccacctccctcccggagggggcggctggccgggcggggggctgacccccccacctccctcccggacggggaggctggccgggcggggggctgacacccccacctccctcccggatggggcggctggccgggcggggggccgacccccccacctccctcccggacggggcggctggccgggcagaggggctcctcacttcccagaaggggcggccgggcagaggcgcccctcacctcccagacggggcggctggccgggtggagggctgaccctcccacctccctcccggatggggcggctggccgggcagaggggctcctcacttcccagtaggggcggccgggcagaggcgcccctcacctccccgacggggcggctggccgggcggagggctgaccccctcacctccctcccagacggggcggctggccaggcggggggctgacccccccacctccctcccggacggggcggctggccaggcggggggctgacccccccacctccctcccggacggggtggctggccgggctgaggggctcctcacttcccagtaggggcggccgggcagaggcgcccctcacctcccggacggggcggctggccgggcggggggctgacccccccccacctccctcccggacggggtggctgccgggcggagacgctcctcacttcccagatggggtggctgccgggcggagaggctcctcacctctcagacggggcagctgccgggcggaggggctcctcacttctcagacggggcggccaggcagagacgctcctcacctcccagatggggtctcggccgggcagaggcgctcctcacatcccagatggggcggcagggcagaggcgctccccacatctcagacgatgggcggccgggcagagacgctcctcacttcctagatgtgatggcggctgggaagaggcgctcctcacttcctagatgggatggcggccgggcggagacgctcctcactttccagactgggcagccaggcagaggggctcctcacatcccagacgatgggcggccaggcagagacactcctcacttcccagacggggtggtggccgggcagaggctgcaatctcggcactttgggaggccaaggcaggcggctgggaggtgtaggttgtagtgagccgagatcacgccactgcactccagcctgggcaccattgagcactgagtgaacgagactccgtctgcaatcccggcacctcgggaggccgaggttggcggatcactcgcggttaggggctggagaccggcccggccaacacagcgaaaccccgtctccaccaaaaccagtcaggcgtggcggcgcgtgcctgcaatcgcaggcattcggcagactgaggcaggagaatcaggcagggaggttgcagtgagccgagatggcagcagtacagtccagcttcggccccgcatgagagggagaccggagggagagggagagggggagggggagggggagggggagggggagggggagggggagggggagggagagctagtttttaaaggactccagctctttctctttctcagggggagttgggttttcttacgtacaactgagtttctgcttacacattctttaatttcttttaattcctgttccagaagaaccacaaaagaagtgaaaatgtccagttcctgccttaattgatgacattccaccactgtgatttgttcctgccccactctgactgatcaattaaccttgtgaccttccttctcctggacaatgagtctcagaagctcccccaccaagcaccttgtaacccccgcccctgcccacaagagaaaaaccccctttgactgtagttttccactacctacccaaattctataaaactgccccacccctatctccctttgctgactctcttttcggactcagcccacttgcacccaagtgaaataaaaagccttgttgctcacacaaagtctgttggtggactgtcttgacatggacgcacatgacaggttccaccatgttttctgtgctcaagcagtctgcccaccttggcctcccaaagtgctgcaattacaggtgtgagccaccatgcctggcttgttcgttctatctatctatctatctatctatctatctatctatctatcatctatctatctatctatctacctatgtatctaaccatctttttagcagagatgtggtctcactatgttgcccagggtctgctcatatatatttcttttttaacattattgttattttgtctcactgtatcacccaagctggagtgcagtggtgggatctcagctcactgcaacctctgcctccctgttctaagcaattctcccacctcagcctcccaagtagctgggactacaggtgcaccccccgccccccagatgatttttgcatttttagtacagacgaggtttctccatgttggccaagctggtctggaactcctgacctcaaatgatccactcatctcggcctcccaatgtagtgggattacaggcatgagccaccatctccatcctggtcatttttttttttttccttgagacagagtcttgttctgtcaccaggctggaattcagtggtgtcatcttggctcactgcaacctctgccccctgggttcaagtgattctcctgcctcagcctcccaagtagctggtattacaggcacatgccaccacacccagctaatttttgtatttttagtagagatggggtatcaccatgttggccaggatggtctcgatctcctgacgtcgtgatccacctgccttggcttcccaaagtgttgggattacaggcgtgagccactgcacctggcctccagtcatatcatttatgtgttgatttttttcagtttgtgtttcagtccagatgcgtagtgatagtaccgggattgagaacaaaaatgttgaaacagatcaatctcaggaacctgtttttttttttggttggttggttgtttttaggggcacaagcgccactgagtgaagtgctcctaatctctgttggttttgaatattgtagaaagcattacagtatttaattttgtgcactaaagattttttctagttctagaatacagataaatctagatgtatgattcttaatcaatcacaagaggctcaataagcctttttcctcattctacttctttcttgaaggggagggccttgatttgcatttgctgcctacagagagcaatttgtccatatttttttctcttctttttcttatcgggagggaaatgagcctgagaaagctgcaggaccatgagttgttagaagattacttccaatgagaggaaaggaagtgtgtgcgacaacacattcagagagaaatctggggaggtagcagagcaggaagcaccagtcatctgtctcccctcctaggcaaaagggaggctggcagaatctgtctgatggagcgatttgggaacactggagtctatgggaggcctgctgctgccagggggaagcctggaagatacactgtgatcaatgccagttcaagttagctttgtttcccaaccccacactttctatgcccccctcaggccagaatcacagtggtggaaaggcttctaaggagaggtatgtgggatggtgctcctacaacaagtcaggatctttaagctaagcctgttttatttctggtctcaagttcaccagaataaaaaaggtattccttgacttagcaatgaatgatatcatggctttagtttattttctgctcacaggtttgagccataaaaaataatttttcttgatatgcaatacatgataactatgtatgtcagaacatgcttctattagtgtactcttgaggatatagtttaaatggcaaataaaattttgcatatatggaagtttctttttatgttactaacagtacaaatatctatcaatacatttacctcttatgtctctactctgaatataaagagcatgataattagatctggatatagatgtttgtaagtagatacaggcaagcataaaattatatgggtttgtctatgtaaatatttatgtatacaaaatatgttcaagagacatcctcctccagccaaaactgatgttgaggcatagacttacattcaaatatatggttgtatagcatctcaggctggaacccagctagctatacaataacattgagggacacagcctgagaagtaagttccagtactgttatgtaaggttttatggaaaacttggaatctgaaggccctgcttttttcttttcactgcatgcctgttatttatatccatcactgggggccttccttgatgcttcttctttcccaaactagctaattggctgattatatttacctgggctgagctaatttggctgattaaaatcacctgagcttagctaattggcttattgaattcacctggtctggatgagcaggcaaggaaaatgaactttgatctactttccttctgaggcttttttacctggcataagcacaaatggactttacctagatacacctatgtgaaccattctgggtgtatatgtttcgctatccacatatcttatatctataaatacatgtacagaactaaatgaagctaggtcagaggtcatttttatttgcattctttccagaccaggtgaatcaagtcagcctaataggctgattgctcagtcgtgatttaccaaatccaagctacatatcacatcacattattcttataaatgtgtaaatgttcttgttatctggcacccgagtgtttttaattcagggtctaatcaaacttgctcagtggaatcctaaccacacagctaggacaagccagaagtgcctgacaccagggactctagcctttctcacaaagatttagcctggagaataagagccaccactaacacttcagcacatgttcgctatcacttggttgaaatatggccagggtccagctttgcatgacaatgaatgactcccttggccttagtgcatttttatttcctagaagaaagaaactagaaacaatgctttcttcatgtatgttaaatgcagcaggttgtatttaagaacaacctcccgtatgtgtgattctggatatagtttataaggcagttaagattatacatgtataaaagtcttttttataccattattagaatcaatacctatcaatatttccactttccacatttttttctgtatgaatatacatacaaagctaaatatgtttgcatatagatatacataggtagaaaggtaaacaaaaacccatacagaattatgtatgtttatgtgaacatttatgtatacaaagcatgttctgaaaagacattttaaatgctctagtatatattaagaacacaaatgtatagtaacttcggtactctgtggcacaataacatctcataatgaaacagagccaagcaatgttgtttgtataagtgtaaacaaagcttcaggttcagggaataagtctagaaagtaagctgacagtacagctatgtaatgctatatttccaggctagcatttcaggctattgctttgtttctcactgtatcaacatgctatttacattcactatgttaggcctgacttgatgaatctgcagtccctatttagacaattgcataattggatccacctgagtcgagctaactagcttattaaagtcacctggactgagctaattggctgactggattcaccagagctgagctcattgactgaatggattcactgtttccaaatagaatgtgtagaaaaatgacttctgatttaattttattttggggctgttttacaaaaaagtgctcacagatcaacattatatagacatatttacataaccctgtgtgtttgtatatgtttatctatctatatatgtcatatttagatcaaaatctacagagaaatgtgtccaataaaactaacattttttttccagtattgaagtaaatgctcaagttacagcccttggcttttattctcttacccaaaaagtcactacttcagcaaagaaaacaaaaatacaaggattgattcctgtgtcacacgtttgaaaaagattctttaaatttatgaaagctttaaagacaattattcagcactttcacatttgggtgagggcctttaagctgaggctattttatttctggtcctatgtttaccagaaagaaaatggtcacccttgacctggcaatgaatgtctttcataaccttagcatatttttattgttcagaagtgagcaacaagaaatgatcctttcttgttaaaagcagaaagatgtatgtgggagcatagttccatttttgtactattttttgaatagtttatggggaagttaagtctatacatatataaaagcatctttttatgtcactatcattaccaatatcaatcaatatttccactttatacatcattattcttatttttttattgagacagggtctcactctgtcaccaaggctggagagcagtggtgccatgtaggttcactgcaacctctgtcccctgagctcaagcaatcctcccacctcagcctcccaagtagctgggactacaagcacataccactacacctggctctttaaaactcgagctcaagcaatccacccacctcaacctcctgaagtgctaaaattacaggtgtgaaccaccgcacctggctatacatcattatgttttataaatatagatacaaagatggatgcatctgaatatagacatacatagataaacatacacacacatataggattatatgactacatatgtgtaaatattaatgtatacacattatgttggccaaaagacattttcaataccctagtatatattatagataaagatgtagaattacttctctactctaacacaatagtattccagaatgaaacatagacatacgatgttgtttgtttaaatgtaaacaaagcttctcctgcatgagaaagatttgggaagatcacagtacacgaactaatagtttatgttcagattagcattttatggccctgcttttattttcaatctatgcatgcactactcccatcaaccattgtaactctgccttgagaaattcactgttgatattttgataattgactgatgggtctaacttctttgagctaactggctgattggaatcacctggcctgagctaattggctgattttattcacctgggctgagctaattggctaattggagaacctgggctgagctaattgaatgattgaaatcaccggggctgacctaatcagctgcatcaattaacctgtcttgagggaaatgagtagtaaaatgacatcttttattttgaggcttctttgcaagacacactcacaaatggaaattacatagacatatttgcataaccctgtgatttctatgtgttaattcatctatgtattttatatctgtatctaaatctacaaaaaaatctatccaaagaaaacttaatttcctttcagtgtagcaggctaactttgagtcatagactccaatttttttttctctaccttaaaaagttacttctttagccaacaaaacaaaaaaatccccaaattatcatgctatgtcatatattcatacaaaagagcccctgaagtttaaagataattatttctggaagtatatttctgggctgagctggttggctgattgtattcacgtgtgttgagaagcaagggtagggtaatgacctctgacatacttttattttttttccaagacatactcataaatggtcattgaataaacatatttatataaccctgcatgttatatatatatatataaaacagaagaaagtgtctagagaaaactaaaattcactgtcagtacagcaatgtatcttcaagtcacagacctcaactattcatttcctaccaaataaagttgcttctccagccaacaaaatgcaatacaataatttatttttttgtcccatgttcaaaaaaaagaattacctcaattggtggaagctttaaataaacattttcagcattcgcacatttgggttagggcttttcagcagaggctaatttaattttggttctgtgttcactagaataaaaagggttatccttgatttggcatgaatgactctcatggccttagtgaatttttatctcccagaagtcagcaacaaggaccaatgcttattttgtataagttaaatgcagatggatggacgttatagcatgcctccatttgtgtactactctagatagagtttattggtcagaacgctttatacatctatggaattatttttatatatcagtatcagtatcaatacctatcaaccctttcaccttctgcatctttactttttatgaataaaaatacaaaaatgaatatatctggatatagatatacacaggtagatgtacatctatgtaaatatttagatagataagtacatctatgtaaatatttaggtgtacactggatgttcacaaaaaggcattttcaataccttagtatataatcaggatgcagatacggacttattaccctactgtatgccacaatacaaacccaggattgtacattgccgtacaatgttgtctacataaacacaaacaaagcttcactttcaaaggtgaggtctttgaagtaagctgacagcatagcaatttaatgctttatgaccagattagcatttcaggaacctgcctaccttctcagtgtaggaatgtgctgtcacgtccactgttttgggcctgacttgatgaatctgcagtcgctatttagataactgtttgattgaatccaagtttgctgaactaattggctgattctttggcctgggccctgcctgcagaagtcattgtgacatatctatggtcccatcagagatgcgactgtcctcttatgcctggaccctgtccacagtgaagatttcaacatatggcttggctcagcacctaagtaataagactctcctattgtgcttgggccctgcctgcaggggttattatgacataaagctgagcccagctcctatgttatgtgactctcttctttttcctgagcccaacctacagggggaatgtttatatatctctgggctagttaaacctatctctctgccagttaaacagttttcttctgttcacgtctaatggaaggctataaatggcattacttagtgaatggaatagctttctaaaagctcaggtgctactgagaagctgaggcttgcaggatttcagcacacttaattctaatcaagtcacaggactcaacctaggaagaagcagttggggaaaagaacctgggcgatgtgactctccatctgggcactcccattagggagtattgtagcatatctttgagcccatcgactgtttgatgtgactctcctgtctcacctgggctttgcccatgggcaagattgtaacatatgtattgggccataacccaggtgttgtgactcttttctcctgcctgacaactgctcccagagtggattgtggcatatggttggcctcaataccaagttggtgttgctcttttgccttggccctgcactcaggagacactgtgccatttcattgggctcagcaccgaggtgatgtgaatctcctgccttgaatctgttcgggggggacattgtgacatatctcagggctcatcaacttacaacatatttgagatgcctcttttatctgatgtgggctttgcccattaaagtaactgtgacatatctctgggcccagcacacaggtcatttaacacttctgcgttggccctgtccacatgttcattgtgatataactctgggcccatgccctaggcaatgtcactctcctcttttgcctgagccctctccttagtggggattgtgacgtattgcttctcccagaacctaggcgatggaacttcctctcatgcccgggccctgcctatgtgagtgattgaatagatagctagacgcagcctctatattatgccactctcttcttcctgagctctacccacaaaggtattgtaacatctctaagcccctctcctaggtgatttgatgcttctttctgaaccctttcctcaggggctgttgtgacctattactaaacacagcacctaggtgatctgacttttctacactgcttgggttctgcccacaatatagattttaatgtatagctcagagcagcacctaggtgatgttactctcctatcctgcctgatccctggatacattgtgtattgtgacatatcactgggtccaacagttaggtgatgtgaccctcctgcatgggccctgacaccaggagtattatgggatatctttgattcatcaccttggtgatgtgaccttcctcttctgcctgggacatgctaaaaacggggattgtgacacatccctgtaccagcacctaggcgatgtgaccgttcttttgcccgggccccatatactttgagtattttaacatattgctgggctcaacatccatgggatagtacactcctgcctgggccttgcccacagggagacttgtgacatatctctgcatgcatcacctagatgttgtgactcttcttttctacctgcaccctgccaacaggaaggattgtgacatatcgctgggcttagcaactaggtaatgtgtctctcctgcatggccttttccacaggggtcattgtgacctatcgctgggcccagcacccaggtaatgtgattctttttgcctgtgtcctgctcacagagtaaattgggacatatcactgtgcccaacacccaggtgatatgactctgctgcttgtgccctgctttcaggagaagattgtgacatatctttggccaagcacccaggtgttgtggcttttttttcctgtctgcaccctgcccacagtgaaaattgtgacatgtcactggaccaacactcaggggatttgatgtcccttctcactctctatgcacaggtggtgttgtgacatatagtttggccaagtttacaggtgtgatgattactctcatactttgaaccagctggtaggagagatactgtcttttgtagcttggcttagcaaaacagtaagagtctgggttatttcgttttacaaaaatcacaggggattatcatgctcttgcctatcacataaagcccttgggtggtacagagtgtcataaaggggccccagcacaaagttgagattgtgtctctcatatgcaaactttgacaacagttaggatggtcatcgtcacaagcggacagaggccactcgtgaggtcctaagtctcatgaaaagatgcagtccacggttagaattgtgacagtcgcatgcaaatatccagatagaattgggatggtgactcatttctaaactaagcttataggttcattgagcaccctcacatctggacccagccaattggagagatgttgatgtgggcttatggccacaggtaagatcatgggcccataccagcctgaaggtatcagagcagatcgtgactctcacacataccataaaaagccctcaactggtacagagagtatcctaacgtgactcagcacacaagtgagatcgtgtctgctgtacacatgcccagatgacagtaaagattgtcatccattaacactaacacagcccattgctgaggtcctgaatctcacacccagaagcagttgaaagttggaaaattgactctcatatgtgaatccggtccacaggtgggttggtgactctcagaccaagactcagcactctcgtgaggttgtgactccgctaaggagacaggctgcgggacggattgaggctttcacgcgtggctccggtccactgttgagactgtgaatcacgtacttagactcaacatacaggaagtgtttcctctcatacctgtaattgagaaatgtgcaggattgttaatctcatccctggcctttcatgcaggtgtgattgtgccctcaaaaggcattgtgaaatattggtgggcccagctcaaaggtgatatgaaatatgcctctccagcatttgagttattttacttttctgtgagagcccagtccacagatgggattgtgacattgctagacccaacaactaggtaatgtgactctattctcctgcattggcattgtccaaagaaggcaaataacacattacttgtcttcgcactcaggtgatgactcttctcctgccttggcactgtgcacagggggcattgtgacatatcactgggctctacacccaggttatgtaacttccatgcctggtccctgagcatagtggccattgtgacatatttcttgctctaaaacccaggggaaattactcttttgccttgctcctacctgcagagggcattgtgacacaactctgtgagtgatgtgacccttccaaaatgggattatggctgagcacagtggctcatgcctgtaatcccagcactttgtgaggctgagtcaggtagatcacctgaggtcaggagctcaagaccagcctggccaaaatggtgaaactctgtctctactgcaaatacaaaaattagctgggtgtggtggcacatgcctgtaatcccagctgcttgggaggctgaggcaggagaatcacttgagcctgggaggcaaaggttgcagtgagctgagatcatgccattgcactctagcctgggtaacaagagtgaaactctgtctcagaaaaacaaaaaacaaaacaaaacaaaaaacaaagtgggattatgacttatgactgatcccagcacctagctgatttgacttttcttttttttccaggttctgcctgcagggaagattgtgacatattgctggaaacaacaccaacataatgttgctcttttgcctgggacctgccctcaaaaggcattgtgatatactggtgggccaagctcgaaggtgatgtgagtatcctgcttcgagccttctcacagagggctttgtgacatatctctgggctaattaactgtttgatgtgactttcttctctgaccttggctttgcccatagggcagagtatgataaacctctgggcccagaacctaggtgatgtgactcttctctcttgcctcaaccacgcccacaagaaggagagtaacatcactgggcccagcacacaggtaatgtgatccttctgcctggtttccccataggagacatactcctggacccatctcctagttgatgttactctccttttctgcctgtgccctgtacacagtgaatattgtgacatatcacttgactgagcacctaaatgtgtgactcttttcatatgcctgggccctgctcactaaagtgatggtgacacatagctgaaaccagcctctaagttatgcaactttccacttctatttgagccctatgctcacggggcattgtgacacacgtttagtttttctacctaggtgatgtgagccttctatctgaactcccccgccaccaaggggtaatgtgacaatttgcttgacccagtactaggtgatgtgactcttccctactgcttggcctcttcccacaggaggaattgtgatgtatcactgggcccagcatgcaggtaatgtgactctcctgcacaggccctgcccacaggggtgattgtggcagattgctgatcccagctcccatgtgatgtgctctcctccactgcttcggctctgcttaaaaagggaatgtgatgtatctcttggtacagcatcgaggtgatgtctctctccttttctgcctgggccctgcatactttgtgtagtgtagcatatggctgagtctaagacctacttggtgtgactctcctgcatgtgtcctgcccacaaggtattgtgacatatattttcattgattacccaagtaatgtgactctcatcttctgtttgggccctgtcagtagacaggattgtgacatgtcactggacccagtatcttgacactgtcactttccttttttgcctgagcctgtcatattttgggcattgtgacttagcactgggcctgacatctgggggatgagaggctgctgcataggccgtgcctacagtgcaccttgtgacatatctctgcattcatcacctaaaacatttgagtcttctttttgtcctgcaccctgctcacaaaaaagactgtgacatattgcggggcccagcaaccagatgatgtgttcttactgcctggaccttgcccatagagagcattgtgacatattgtttggcccagcattcaggtgacatgactctgctgcctgtgacttggttccaagatagaattataacatgccactggccaagaaccaagatgatttgacccttctacctggtccttgccctccggaagattgtaacatagccttggcttattacccaggtgatgtgactctcctgcttgctccctacccacaggtgatattgtgacatatatcttggcctagcttacaaacgggatgatgactctcatattttgaaccagccaatatcagagatattgtctcccatagctaggattagagaaacaatttgggttctgtgctttcttaatgtatgaatgtcataaagcattaaccactctctaacatgccatataaagccttcaggtggtacagagggtgccatcacaaggtgcagtgcacagatgagattgtgtttcttgtatgcacattctgccaactgttaggattatcactctcatacatggaaagaaccaactggtaagattcttaattgctcatgtggatgcaagtcacagttggaattgtgactgtgatatgtgaacatccggcaacaattaggatggtgaatcatttctaaacccacatcataggcaggtaagaactctcctatctggacacagccaattagagacatgttgactttcattcctggacttaaggccacaaatactgtagggaccagccccacagggtcagtgggtctctccctgtgtgtggcgatgagagagtgtagaaataaagacaccagacaaagaaacaagagaaaaggcagctgggcccgggggaccactaccaccgatgcgcggagaccggtagtggccccgaatgtcgggctgcgctgttatttattggatacaaggcagaaggggcagggtaaagaatgtgagtcacctccaatgataggtaaggtcacgtgggtcatgtgtccactggacagggggcccttccctgcctggcagctgaggcagagagggagaggagacaaagagaaagacagcttacgccattatttctgcatatcagggactattagtactttcactaattgactactgctatctggaaggcagagccaggtgtacaggatggaacatgaaggcagactaggagtgtgaccactgaagcacagcatcacagggagatggttaggcctccggataactgcgggtgagcctgactgatgtcaggccctccacaagaggtggaggagcagagtcttctctaaactcccctggggaaagggagaccgccccccccccccaccctttcccagtctgctaagtagcgggtgttgtttcttgacatcttttgctaccgctggatcatgatccgcttggtaacgggcgtcttcccagacgctggcatcaccgctagaccaaggagccctctggtggccctgtccaggcataacagaaggctcgcacacttgtcttctggtcacacctcactatgtcccctcagctcctatctctgtatagcctggtttttcctaggctatgattattgagtgaggattatcataatattggaataaaaagtaattgctaccaactaatgattaatgatactcatatataatcatatctaagatctatatctggtataacaattcttgttttatattttattatactggaacagcccatgtcctctgtctcttgcctcggtgcctgggtggcttgccacccacatctcccccctttttattaactagaatcgccatcgccatcattgcttgtcgttgacttcagacttggtttcggactccttggaggcatctgcagactaaaaggagacaacataagcataccaatattaataatgccagtaacaacaatgatcctctgacaggtttgagccatttgaagggattaaaatcagataattatttagctatgccttgaaaaatgtctgagccaggaacagtggataaatgggcttgtgaagcctcaaagatttgctctttaagttgtgaaatatccaaggttatgttgtcatcccaggcttttaaatgtcttgagaccttttccagctatgttgatcttgattataagcataaggcgttatgcaataatcagaagtattccaatcacactgtaattgcatacggtgttccaaattcataactctatctcccagccaggttacactttggcagagatcattaatctgattagctaatttttgatcaatttgcacctgagaattccaaagtctggaggggtttttctgccatgcttcaacatagtgagcagtttgaacagagttgtggatggcaactccagcagttgctgctgttgcagtaaccgcaattagtcctgcaaggactgcaataagagtaaaaataaatctctttgttcttttaagaatgcctttaagaacttcattgactatgtgaatagagggggaagactcccatggatgacataaagaaactggtatccataccccctccctagcccttatcaagagaatactggtagtgggattaaaagttgcatcaatgcaagtgaacagcttacagttatgacattctgtagtttgtgcatcaggcataataattatatttccaaccaacagcatgtaagagggtttgacacagctcctaataggtatcacccattcagaaataagggtgatgttgaaatgtggatgttttggttttagtacgaaggagttgataggtagtgttccatatccttattcctgacaaaactgcagctaatttccatagttcaggatgttgtggggtaacaaagggatgaatcatttttggcctaggaggagcaatgcctgtgtccatccatttaaatgggtaaggagacaccattgtctcattgtgtaagactgccatccatgctgtatataatctaaggaataaactccgaacataaggtattttttgctggagcaatcttgccaataatgtccttttggagcctaatcaataacaatacccgtggctagagttttgagcacaacagccttgggagcattacaatcatcccataaaattgaagtcactataaaaggtccctttgtaggtttctttggacagtctggcagtccttttgttttattagttttggtagtgagaggaattctccatgcctcatgtggggtacgtttgacagtgagaagttgaaaagagttagtactgaacacattatgtacttgataagaatcatttgtaaaggacggtacggtccacatccaattctggtaagaataagctaaacagccaggcgacttcccaatacgtagtggtggatatttatagccaattgacagattaaagtgcataccttcttcttccggttgagctggaaaccgatcatcattagggatcggcatgaatgcactattattagtgtaaacttctactggggagtccatccaggagacagaccgaattagagggggaaaaggaacatatgcccaataagtataattttgagttgccccgaccggtggtatacttaccgctgcactgactaccataaaggcagccacaattatattaccggtcgtttgggggattctttttctgttaagaatttttctgtttgatgagataacatctttatttgaccccaagtaggtggagttgaacgagaggtgttgtaggtcacacggcgagattttgtctcaatgtggatgtcacgaagggtatgtgtcaggcggtgaaagttgctcttttgtttccgatgggtctttgccttttgtttctgggagcgtttcatctttggagttatggtgcagttttaattgtcgggaggggacccacacaggttgtagtccttttcctggggaaacacaagcaaaacccctaccccaagttatgaccgtgcctaattcccgtgtgttagtttttacgtccttccaccatacccgcattcctttttgtggatcaaatttatttacagtgaaatgttgttctgcggctgtgaaaggttgatttcttgttaagtttaagaaatttagtgtgaaaagagccagatttaatttggcatgaggagtaacagcatctccctttaatttagtatcctgtttacgcagttgatctttgagtgttttcttggctcgttcaaccaaggcctgtcctcgagagttataggggatgcccgttgtgtgagcaattgcccatgtctgaggaagctttttaaaggcagcactagtgtagccggggccgttatcagtttttagtttctcaggacagcccataaccgagaaacaggaaagcatatgtcgtttaccatgagctgtactttctcccgtttgacaagtggcccaaataaaatgagaaaaggtatcaatagttacatgtataaaagaaagcttgccaaaaggaggataatgagtcacatccatttgccgaagagcattctgtgaaagtcctgtagggttaactcctgaagacagtggctgtaaaattaacacttgacaagtaggacagtgacgcacaataattttagcttgtttccatgtaagggggaacttgtttcggagtcccgcagcattgacatgagttaaagcatgaaaattttctgcatctgtaaaaatgggagtaactagtgtatcagctctggcatttgctgccgagaggggtccggggaggggtgtgtgggcccgaatgtgagtaatgtagaaaggagaagaccttgctctgagcacagactgaaacttttgaaaaagaaaggttatcatcaggcataaattggattaaggcagtttcaatgttgtgagcaacatgtactacatacgctgagtcggagacaatgttaactggttcaggaaattcttcaaggacagccctaacagcaagcagctcagctcgttgtgctgaaatagcccctgtgttaagaacacgttctctgggtcctgtatatgctgctcggccgttagaggaagcatcagtgaaaacagtgacagcttcaggtaatggggtgtttctagtaacgttaggtaaaatccaagacgtgagtttaaggaactgaaataattttacattaggacagtgattatcaattatacccgggaaacctgccaaatgcacttgccaagcgatgcaagtagcaaaagcctgttgaacttgtaatcgggtaaggggaacaatgattttttggggctctgttcccgaaagacgaaggagatgagaacgagcctgaccaattaaggtagaaatttgatctagataaatagttagcatacgtaaagagctgtgtgggagaaaacaccattcaattaaattatgtccctgaataatgagtcctgttggtgaatgttcagtaggaaaaattagtatttcaaaaggtaaatgtggattcactctggtaacctgagactgttgaatgcatttttctataagtcgtaattcagaatccgcctcaggagtcaaagaccttttactgcgtaaatccggattgccccgtaatgttgcaaaaagattagacacagcataagtaggaatgcctagggagggacgaatccaattaatatctccaagtaatttttggaaatcatttagagtttttaaagagtctcgtctgagttgaactttttgaggcttaatgaccttatcctctagctgcatccctaaatagtgataaggagatgaagtctgaattttttctggggcgataaccaagccagctgctgtgactgcttgttgtaaagcagaaaaacaagatattaatacagagcgtgaaggtgctgcacaaagaatatcatctgtgtaatgaataatataacattggggaaatttatctctaactggctttaatatgcatcccacataatattgacaaatagtggggctattgagcataccttgaggtaggactttccaatggtaacgtgctgcaggagcaacgttgttaagggttggaacagtgaaagcaaatttttcaaagtcctgaggagccagaggaacggtaaaaaagcaatctttaaggtcaatgatgataagtggccaatactcaggaatcatagtgggggagggcaaaccgggttgtaatgtccccataggctgaaggacagcatttaccgccctaagatcagtaagcattctccacttaccagatttcttttggataacaaaaacaggtgaattccaaggagaaaaagaaggttcaatgtgtcccaattttaactgtgcaagaaccaaaatatgaagtgcctccagcttattttttgggagtggccactgatctacccagacaggtttttgagttttccaggtcaaagggatgggttctggaggcttgatagtgactgcttctaaaaagaataaccaagtcctgtagagtctgctttaggagtaggtatgataggctcagtgatgccttgtgctgattttcctaaacccagaccttgaacaaatcccattttggtcatcatatctttactctgctggctgtaattgcctttaggaaaagtaatctgagccccccattgataaaaaagatctcttcctcacagattgacaggaatgggtgtaatgagggggcgaatagttccaatctgtccttcagggcctgtgcaatgtaaaattatggagctttcatatacctgtgaagcctgaccaacacccactaatgctgtggaggcatgctcctttggccagtgtcggggccattgatgtaaagcgataatggaaacatcagcgcccgtgtcaatcattccctcaaacttctttccctgaatatgcatggagcacacaggacgagtgtcagaaattttgctggcccagtaggctgctttaccttgataatctgtgctaccagaacctccctttcttgtactagaactagatcccaaaggaatgtaaggaagtatcaggagttgagcaatgtggtccccagctgctgcattccaagggactgcagagctaatgacaatacgaatttcacctgaatagtcagaatcaattacaccagtatgtacttgaacaccttttaaatttaaacttgaacgtcccactagcaaaccgacactgccagtcggcaagggaccaaaaacacctgtaggaacagcaataggtggctctccaggcaacaaagaaatatctctggtacaacagagatctactgctgctgagcctgtggtggtgggggacaagcattgtactgagattggtgttggggctgaggcattagatcctgtggcacaaattgctgaagtgggaattggggtggaggttgaatggattgaactgggaaggctcccgtttggctggacgccaggggctgagagttgaggaatgccccactgtttagaggggcctggggccagcccctcatcctgtttccccgatttttaaaaggccgtaaaggattgccatcaatatcaaatctggaatggcattgagatgcccagtgaagaccctttcggcatcgtgagcatacagtagaaggtggggcatcttgttgctgaaaagttttttgttgttgttggtggtgatgtaaaggacagcgacctgcatgccgagggcaatttctttttgcatgtcccttctggccgcatatgaagcattggccagaggattgtccaggcatttgaatagaggccatagcttgtgccataatcattgctgtatggagagttcctcccaccccttcacaggctttaatgtaggaggtgagtatatcaccacccggtggaattttacctttgacggggcgaatagccgcctgacaatctggatttgcttgttcataggccataagttctacagcaagtctttggccatggctatcaggaatagccttttctgctgcgtcttgaagacaagcaataaagtctgggtagggctcatgttgtccctgtctgacggctgtgaaagatgggcatactttaccatcatcttgaattttgtcccaagcatctaagtaacattttcgcagttgttcgataacctcatcatttagtatagtttggtgtcggattgcagcccattgactcattcccagtaactggtcagccgtaacgttaacagggggattagagccctgattaagacgaatgcgttcctggacagcatcaacccaccaagtcctgaattgtaaatattgggatttagataagactgattttgccaaaatttcccaatcatagggtaccaaacgtttatcctctgctagggcttttaatgtggaatggacaaaaggagagttggtgccatattgtttcactgattccttaaaatctttgaggaatttaaaagaaaaactttgccacgtagcaggacgtagctgaacctggcctggatggatggggtcaggctgaattaccacctgaacagcgggaatgcccggtattggctgtgccccaggagccggcaattgcagagcctgattatttacccgagcagcctgattctcaggctgaggggcttgattatcagcctcttgatcttgttgagctgcggggtcagccgcctgctgggcaggatcaacaacaggctgtgggtggttttgtactgctggggtggcaggtactgggggttgtaaaattacaggaaattgccaagcttcaggatccccatattcccttgcctgaactatagccctcataagcggagtgtcatcttcagggatgtatgtaatttgttgcttatgagcggcaatggtagtattggcaacagcagttgcgactggaccaggagcagaaaaagaggtagaattttgaatagaaggagagtcgaaaaactgaaagccagggtgagagcagactacctgctgagcaggtctttcatgggcctgaaaaccaggctgccacggcaagtgtgaaccaggcttcaagggagcctgtgactctacccgagtctgatttgtaggaaaggaaccaggcttcaagggagcctgtgactctaagtgagtgcgatttgtaggaagtggaccaggcttcaagggagcctgtgactgtaactgagtccgattaggaggaaaagaaccaggcttcaagggagcctgtgactctaactgagtccgatttgcagggaatgaaccagccttcaagggagcctgtgactctaagtgagtcagattaggagaaataggattgagggcctcattaccgggccgagaattggaagcctcttttccaagctgttcatatagcagagcctctgtaccgggctgcatagaaacgtaatttgtagactcgtttacaggctgcctggtctcatctgctatttgcacggcggcagtgttgaaagagtgaggagagacaggagggtctggccgcaatggctgttgatatgtttcagctgagttttgctgattgggggagataagtacatttaggtcagttaaaagatcatcataaagcggcaatgggggtgcagtagcctctggcgtaggtggtggtgtcgcaggcatgtcagagtggaagtcctcctttgaaattacgttctcaacttgtgcggtatcctcaggggaaagagagctgagagcttcctcgacctcctcagaggagaggaaagagggatcagtctccatattgtcctcctgagtctgtaaggagtctaagacagagcgaaccgaagcccagattgaccaaatggtgggtgggataaaatgtccccctttatgagcaattttgaattgtttgccaatctcatcccaatctttaagttctaaagttccctcagtcggaaaccaagggcaaagaagatctacaacctcaaatagttcaattaacttttcagtagaaactttaacacctccttctttaagaagagtttttataaaatttaaataagccgaatactttgtactggcctgtcccatggggtccccggaaaactctgagtgttcaagcttaccaccaagtttattgactgcaatcttcaggaatctctcgttgaactcctccgctgatcctgcactcagggtgcaacttcacacagcgagggagagccccacgtcggagagccagatgtagggaccagccccacagggtcagtgggtctctccctgtgtgcggtgatgagagagtgtagaaataaagacacaagacaaagaaacaagagaaaaagcagctgggcccgggggaccactaccaccaatgcgcggagaccagtagtggccccgaatgtcaggctgcgctgttatttattggatacaaggcagaaggggcagggtaaagaatgtgagtcacctccagtgataggtaaggtcacgtgggtcacatgtccactggacagggggcccttccctgcctggcagctgaggcagagagggagaggagacaaagagaaagacagcttatgccattatttctgcatatcagggactattagtactttcactaattgactactgctatctggaaggcagagccaggtgtacaggatggaacatgaaggtggactaggagtgtgaccactgaagcacagcatcacagggagacaggcctctggataaccgcgggtgagccggactgatgtcaggccctccacaagaggtggaggagcagagtcttctctaaactcccctggggaaagggagacccccccccccaccccccaccactttcccggtctgctaagtagcgggtgttgtttcttgacaccttttgctaccgctggaccatgatcagcttggtaacgggcatcttcccagaagctggcgtcaccgctagaccaaggagccctctggtggccctgtccgggcataacagaaggctcgcacacttgtcttctggtcacacctcactatgtcccctcagctcctatctctgtatagcctggtttttcctaggctatgattattgagtgaggattatcataatattggaataaaaagtaattgctaccaactaatgattaatgatactcatatataatcatatctaagatctatatctggtataacaattcttgttttatattttattacactggaacagctcgtgtcctctgtctcttgcctcagtgcctgggtggcttgccacccacaaatacaattatgggtttctaccagcaagaaaatctcagagaaaatagagattctcatgcatattttatgaagccctcacatggtatagagagtatcctataagggcccaacacacaagggaaattgtgacacttgtatgcacaagcagcctacagtattaatagccattctcgtacatgaacaccgctcactgtagaggttctgaatctaaaacccagaggcagtcaaaagttaaaaaattgtcccccatatgtgaatccagtcacaggtattggtgactctcaggccaatattcagcacacctttaagactgtgactttactaaaaagacacagtaagcaggaaggattgaggctttcatgcatggattaagtacatgattgagattgggactcatgtactttgacccaacatacaaagtgttgactctcgtacctggaacaaagacacacgtgagattgtcaatctcatctctaaatcatcctgcaggtgtgattgtaacatacaccttttcccagcacctgagtgattggatcctcctacctcagcctagtccccagaaaaaaattttgacatattgctggactgagcacctagatgatgtgactctattttcttggagctgcacacagtgggtagtttgacatattgctgggctgtgaattcaggtgatgtgagtcacctctccacattccacagggggcattgtgacatatcacttggcctcacatccaggttatatgactcctgcccgcaccctacacacatgagccatttgtgacataatggccagcacccaggtaatgtaactcttttgcctgggccctgtttacataagacttttggtcacatctctgcacccatcaaccatgtgatctgactctcttcttttgccttatttctgctcacaggaaaaattatggcatatcattgggcccagcatcagtgattatgacatatcactgggctcagcccagcctagctgatgtggctcttctctctctctctctctctctttcactctctctcttttagattctgaccacaaaagagattgtgacacattgctgagtccaacatcaagatgatgttatacttttaacttggccctgccctcagaaagcattgtgacatatttctgatgccagcattaagattatgtcagcctcctgcttgctcctttccaaaaggacgcattgtgacatatctctgggctaattaacaatttgatgtgagtcttctctcttactttggtttttctcataggagaaattgtgacatgtctctgaacccagcacctcggtgatgtcactgttctcttttttcttaattatgtccacaaaagaaagagtgacttgtcacagagcccaggacacaggtgatgtgattattcaatctggtccctgcccgaggggtcactgtgacatatcttagggccatcaccaaataatgtggatctcctgttcttcctgggacttatccacagtgaagattgtaacacattgcttgggccagtgtttatatgatatgactttcctcttatcctgctggctagggtaattggaacatttaggtggcccagcctctagtttatgtaaatctcctttttttcctgagcctaacccacaggggggcatttcaatgtatttctgggcttttcacctaggtgatgtgactttgctgcctgggcccttccctcaggagctattgtgacgtattgccagaacaagcacctagctgatgtgtctctccactacagacagtgtcatcacagggccaatcaaaaatatgagattgtgtttctcatatgcatacttaaccaagtgttataattgtcactcttaaacatggaaagaatccactggtgctgtccttaatctcacacgtgggtgtagtccacagttggaatagtgactgtcatatttgactatccagctaaagttgggattgttactcatttctaaacccagatcataggcaggtgaagactctcctatcttgacccagccaatgggaaaggtgttgactcttataactttgcttagtgccacaggttcaaacatgagtccatacgagtaaaaaggtctcagagagaatttgcatctctcatgcttatcatataaagttctcagatgatacagagagtgtcctaacaggacccagcatacaggtgacattgtgccacttttatgcacatccacccaacaggaaagattaaacacagagcccaggcaaaaacctcacacatgaacccagccccctgttgaggtttggaatctcaaatccagacagagtacgaagttagaaaattgactctcatatgtagatgtcatccacaggtgtgttaatgcctgtcagatcaacattcaacacacctgtgagcctgtgtctccactaaaataacacactctgcacaaaaaacctaggctccaatgcgcaactgcacaccaccattgagattttgactcatgtacttagaatcaacatacgggtggtatttactctcatattgaaaaccaggatgtgtccaggagtgttaatctcacctgtgaaccttttttgcaagtgtgattgtgacctatgcctctgcccatcatctatttgagtcttctgcctgggaccagccaacagatgggattgtgacatacggctggagccagcatttaaatgatgtgactccatttttctgccttggtgctgccaattgggcccagaaccaaggtgatgtgagttttctgcctaaaatccacccacagggagcattatgacaaatctttcagcccatcaattgtttgatgtgacttttcttttaccggagctttttctttttttttttttgttatttttaattattataaatacataatggttatacatatttatcgggtacatgtgatattttgatacaggtgtacaacatgtatgatcaaatcatgctcactggggtattcatcacctcaagcatttatcatttctttctattaggaacattccaattcgacttttagttattttaaaatacacaataaattattgttaaacatagtcaccctattgtgctatgaaatactacattttattcattctatttgtgtttttctatccactctttattatcctctctttattatcctttctttcttctttttttaaaattatacattaagttctatggtacatatgcacaacgtgcagatttgttatatagatatacatgtgccatgttggtttgctgcacccatcaactcatcaatcatttacattaggtatttctcctaatgctatcctccctgccagccccccaccccctgacaggtgtgtgatgttccctgtcctgtgtccaagtgttctcattgttcaattcccacctatgagtaagaacatgtggtgttgggttttccgtccttgtgatagtttgctgagaataatggtttccagcttcatccatgtccctgcaaaggacaggaactcatccttttttatggctgcatagtattccatcgtgtatatttgccacattttcttaatccagtccgtcattgatgggcatttgggttggttccaagtctttgctattgtgaatagtgccgcaataaacatgcttgtgcatgtgtctttatagtagcatgatttataatcctttgggaacatacccagtaatggcgttgctgggtcaaatggtaattctagtcctagatccttgaggaattgccacactgtcttccacaatggttgaactaatttacactcccaccaatagtgtaaaagtgttcctatttctccacatcctctccagcatctcttgtttccttccttttttttttttttttttttgagatggagtcatgctctgtcccccaggttggagtgcagtggtgctatctaagctcactgcaagctctgcctcccgggtttacgccattctcctgcctcagcctcctgagtagctgggactacaggtgcccaccaacaagtctggctaattttttgtatttttagtagagacggagtttcaccatgtcagccaggatggtctcgatctcctgacctcgtgatccacctgtctcagcctctcaaagtcctgggattacaggaatgagccactgtgccaggctgtttccttaccttttaatgattgccattctaactggcatgagatggcatctcattgtggttttgatttgcatttctctgatgaccggtgatgatgagtatttttttcatgtgtctgttggctgcataaatgtcttcttttgagaagtgtctgttcatatccttcacccactttttgatggggttgtttgttttcttcttgtaaatttgtttaagtttgtagattctggacattagccctttgtcagatggatagattgcaaaaattttctcccattctgtaggctgcctgttcactctgatgatagtttcctttgctgtgcagaagctctttagtttaattagatttgttgccattgcttttggtgttttagtcatgaagtccttgcccatgcctatgtcctgaatggtattgcctaggttttcttctagggttttcatggttttaggtctaacatttaagtctttaatccatcatgaattaatttttgtataatatgtaaggaagggatccagtctcagctttctacatatggctaggccgttttcccagcatcatttattaaatagggattcctttccccatttcttgtttttgtcaggtttgtcaaagatcagatggttgtagatgtgtagtgttatttctgaggcctctgttctgttccattggtctatatctctgttttggtaccagtaccatgctgttttggttactgtagccttgtagtatagtttgaagtcaggtagcacgatccctccagctttgttctttttgcttaggattttcttggcaatgcgggctcttttctgattccataggaagtttaaagtagttttttccaattctgtgaagaaagtcattggtagcttgatggggatggcattgaatccataaattaccttgggcagtatggccattttcatattgattcttcctatccatgagcatggaatgtaattccatttgtttctgtcctctcttatttccttgagcagtgattcatagttctccttgaagaggtccttcatgtcccttgtgagttggatttctaggtattttattctctttgtagcaattgtgaatgaaagttcacaaatgatttggctctctgtctgttattggtgtagagaaatgcttgtgatttttgcacattgattttgtatcctgagactttgctgaagttgcttatcagcttaaggagatttggggctgagatgatggggttttctaaatatacaatcacgttatctttaaatagggacaatttgacttcctctcttcctaattgaataccttttatttctttctcttgcctgattgccctggccagaacttccaatactgtgttgaataggagtggtgagagaaggcatccttgtgttgtgcaggttttcagagggaatgcttccagtttttgcccattcagtatgatattggctgtgggtttgtcataaatagctcttattattttgagatacgttccatcaatacctagtttattgagagtttttagcatgaagggctgttgaattttgtcaaaggccttttctgcatctatctatcgtggtttttgttattagttctttttatgtaatggtttacgtttattgatttgcgtatgttgaaccagccttgaatcccagggatgaagcagacttgatcatggtggataagctttttgatgtgctgctggattcggtttgccagtattttattgaggatgtttgcatcgacgttcatcagggatattggtctaaaattctattttttttgttgtgtctctcctaggctttggtatcaggatgatgcaggcctcataaaatgagttagggaggattccctctttttctattgattggaatagtttcagaaggaacggtaccagctcctctttgtaactctggtagaattcagctgtgaatccatctggtcctggacttttttttggttggtaagctattaattattgcctcaatttcagagcctgttattgatctattcagagattcaacttcttcctggtttagtcttgggagggtgcgtgtctccaggaatttatcaatttcttctagattttctagtttatttgtgtagaagtgtttacaatattctctgatggtagttcgtatttctgtgggatcggtggtgatacccctttatcattttttatcgcatgtatttgattcttctctcttttcttcattagtcttgctagtggtctatcaattttattgagcttttcagaaaaacagctcctggattcattgattttttgaagtgtttttggtgtctatcttttttcagttctgctctgatcttagttatttctatttcttgccttctgttggcttttgaatttatttgctcttgcttctctagttcttttaattgtgatgttaggttgtgtattctagatctttcctgctttctcttatgggcatttagtgctataaatttccctctacacatagctttaaatgtatcccagagattctggtactttgtgtctttgttctcattagtttcaaagaaaaacgttatttctgccttcatttcattatttacccagtagtcattcaggagcaggttgttcagtttccatgtaagttgtgcagttttgagtttcttaatcctgagttctaatttgattgtactgtggtccaagagacagtttatagtaatttctgctcttttgcattttctgaggagtgctttacttccaattattggccaattttagaatagtgcgatgtggtgctgagaagaatgtaaattttgttgatttggggtagagagttctgtagatgtctattgggtctgcttggtgcagagctgagttcaagtcctggatatccttgttaaccttctgtcacatcgatctaacagtggggtgttaaagtctcccattattatgtgggagtctaagtctctttgtaggtctctaaggacttgctttatgaatctgggttctcctgtactgggtgcatatatatttaggataattagctcttctggttgaattgatccctttaccattatgtaatggccttctttgtctcttttgatctttgttggtttaaagtctgttttatcagagactagaattgcaaccactgctttttgttttgctttccatttgcttggtagatattcctccatccctttatgttgagcctttgtgtgtctattcatgtgagatgggtctcctgagtacagcacactgatagatcttgactctatataatttgcaagtctgtgtcatttaattggggcattttgcccatttacatttaaggttaatattgttatgtgtgaatttgatcctgtcattataatgttagctggttattttgcctgttaattgatgcagtttcttcatagcatcgatggtctttacaatttgacatgtttttgcagtggctggtacaggttgtttttttccatgtttagtgcttccttcaggagctcttgtaaggcaggcccggtggtgacaaaaatctctgtgcatgtgcttgtctgtaaaggattttatttctccttcatttatgaagcttagtttggctggatatgagattctgggttgaaaattcttttctttaagaattttgaatattggcccccactctcttctggcttgtagggtttctgctgagtaatctgctgttagtctgatgggcttccctttgtgggtaatccaacctttttctctggctgcccttaacattttttccttcatttcaaccttgatgaatctgccaattatgtgtcttggagttgctcttcttgaggagtatctttgtggtgttctctgtatttcctgaatgagaatgttggcctgccttgctagattggggaagttctcctggataataccctgaaaagtgttttccaacttggtgccattctcgccatcactctcaggtacaccaatcaaatgtagatttggtcttttcacatagtcttatatttcttggaggctttgtatgtttttttactcttttttctcttaacttgtcttcttactttatttcattaatttgttcttcaatcaataatatcctttcttccgcctgattgaaatggctattgaagcttgtgcatgtgtcatgtagttcttgtgccatggttttcagctccatcaggtcatttaatgtcttctctacactgtttattctagttagccattcatctaaccttctttaaagttttttttagcttccttgcgatgggttaggacatgctcctttagctcggagaagtttgttattaccgaccttctgaagcctacttctgtcaacttgtcaaagtcattctccatccagctttgttccattaatgctgaggagctgcaatcctttgcagaacaagaggtgctctgatttttagaattttcaggttttctgctctggtttctccccatctttgtggttttatctacctttggtctttgatgttggtaacctacaggtgaggttttggtgtgggtgtcctttttgttgatgttgatgctattcctttctgcttgttaattttccttctaacagtcaggtccctcatctgcaggtctgctggagtttgctggaggtccactccagaccctgtttgcctgggtatcaccatcagaggctgcagaacagcaaatattgcagaacagcaaatattgctgcctgatccttcctctggaagcttcatcccagagggcatccatctgtatgaggtgtcagttggcccctactgggaggtgtctcccagttaggctacaagggggtcagggacccacttgaggaggcagtctgtccattctcagggttcaaaacccatgctgggagaaccactgctctcttcagagctgtcagactgagacgtttaagtttgcagaagtttctgctggcttttgttcagctatgccctgcccacagaggtggagtctatagaggcagtaggccttgctgtgctgtggtggactccacccagttcgagcttcctggccactttgtttatgtactcaagcctcagcaatggtggaagcctctccccacaccaggctgtgaccttgcaggtcaatctcagactgctgcactagcagtgagcaaggctctgtgggcgtgggacccattgagctgggcacaggagaaagtctcctgttctgccagttgctaagaccatgggaaaagtgcagtatttgggtaggagtgtcccgtttttccaggtacagcctgttacggcttcccttggctaggaaaggaaaatcccctgaccccttgtgcttcttgggtgaggccatgccccaccctgcttcggctcacccactgtccaaccagtcccaatgagatgaaccagatacctcagttggaaatgcagaaatcacccatcttctgcatcgatcacactgggagctgaagactggacctgtttctattcagccatcttggaatggaatctaccagagctttttctatagaagagattttgatatattttggggcccagcacctatgtgatgtgactctcttctctttctttagccatgaccacagtgggagtccataacaccacaaaagtcacagagtgaattgtaactctcatgcatactgtacaaagcccttgaatagcactgtgtttttacagagatcagcacacaggtgacattgtgacactcatatgcacacccagaatcagtaaaaattgaatctttccatacagacacagctgacagttgagattctgaatctcacatccagaggcagttgaaagtttgaaaattgactctcatacatagactcattccagagatagtttgatgagtttcagaccaagattcagcacacctggaaggctgtgactcccctgaggggacagagtctgcaggagatattgaggctgtcatgtacgtatctatgccacagttcagattgtgactcatgcacttattttcaacctgcagtaggtgttgactcacataccaagaactaggaaatgtatgaaatttataatctcatcccagaaccttccttcaggtgtgattgcaacaaacacctcttccaagcacctgagtaatttaactctcctgcctgagcttagcttgcaaatgaaattgtgacatatcactggattcagtacctaggtgatatgactctattctcctgctttggtgctgcccataggggacattgtgacatatcagtaggcccagatttttttttttttttttgtgattgaacaatgctgcctgtacccttctttctgaaggagattttaatgtaattattgctgagcatccaggtgatgtggctctcctacctggtgcctgccctcaggaaagattgtcatgtacatcttggcacagatcacagatgcaatgatgactctcataccttgaaccagccaataggaaggtattttttctctttaggcttagggaaatgggtaagatcctgggtctcctctttgtatgatggtcataaaggattaccacactttcatttatcttacaaagctctctggtggtatggagagtgccatcacagggcctagtgcacaagtgaaattgtgtttattgtatgcacaccccatcaaccattaagattgtcaccttcacacatagaaagagccaactgatgagtttcttaatcacacagctatgaggcccacagttggaattgtgatcatcatatgagaacattctgccagaggtgagatggtaacccatctctaaacccaggtcataggcaagtgaggactatttgaactggacccagccaattgaagggatgttgactctgctgcttgggcttagggtcacaagtataatcatggatttatgttagcataaaagtcccagagcaaattgcaactcccacacataccttataaagccctcagtggtacagagactattttaacagggtacagcacacaggtgtgattgtgaagcttgtatacacatccaactgaagtaaagattgccatcttcttagatgaacaaagcccactgtcgaagttttgagtctcacacctggaggcagtggaaagtttgaaattgactttctgttccacagaagggtgagtgactgtaagatcaagattcagcacacgtgtgagaatgtgactccactacagaaatacagttcacaagagggattgaggctctcacacagattcagtccagtgttgagattgtgactgatgtacttagacacaacacaaagggcatgttggctctgttacctagaactgggacatgtgctggattcttaatttaatctctggaccttcctgcaggagtgacagtgacatgtgtctctttccagcacctgagtgatttgactcttttgcttggggcctgcccaaatatgagtttgtgacatatcactaaaggtagcacctaggtgatgtgactcattctctttacttggtgctggccataagagacattttgacatatcatgggccttgcaacctggtggtacgaatcttctcttctgtctttgttttttttttaaggcggcattgtgacatattgctgccctgcaaaagggttgtgtgacgctcctgcctgtgccctgtccacatagaccattgtaacatattgttgggtctaacactttggtgatgtaactctcctgcctggtccctgcctacagaggacattgtgacatatttctctgcccatcacccggttgatgtgactcacttctcctgcctggtctctgctcacagaggagattgtgacatatacctgggcccaggacctagctaatttgtcttttgtctttttacagctttctgccaacaagaaagatagtgatatataatggggtttaattccaaggtattaataatattgctattttcccttggccctgctctcagatggaattgggacatattgataggccccagaagcaaggcgatgtgagtctcctgcctggagcctgtccacagagggcattgctgcgtatctctgagctcatcaactatttgatatgactctccttttacttgagtttttttaaataaaagagattttgacatatctgtgggcccagcacctaggtgatggaactgtcttctgcctgagtcactcccacagatgagacagtgacttatttcttggaccagcacactagtgatgtaattttcctgcctgatttctgcacacagatttcactgtgacatatctctggccccatcacctatatgatttgacagtcttctttgttctgggacctctccacagtaggcattgtgatatatcacttggcctagcaggtaaggtgactcttctctcattcctgggccttgcccactaaggtaattgtgacatatagctgggctcagcccctaggttatgtgaatctcctctttttcctgagcccctgtcttagtccaatttcacactgctataaagatactacctgagactgataatttataaagaaaagaagtttaactgactcacagttccacatggctggggaggactcaggtaacttacaatcatggaggaaggcaaagagaaagcaaggcacatcttacatggtggcaggagagagagagagaaccagtcagaggggaaaagtcaaacacttttaaaccattagctgtcatgagaactcactcactatccatgagaatggtgtgaaagaaactgacccatgatccaatcacctcacaccaggagctcctcccttgacacgtggggattacaattagaaatgagatttaggtggggacacaatgccaaatcatattattctgcctcttgccccttccaaatctcatgaccttctcacatttttaaaacataaacatgcctccccagcagtcctcaaagtcttaacttatttcagcattaactcaaagtttcatctgagaaaaagcaagtctcttccacctatgagcctgtaaaatcaaaaagcaagttagttactttcaagataaaatgagagtacaggcattgaggaaatgttcctgtttcaaatgggagaaatttgtcaaaacagtggcgacatgttccatggaatctcaaaatccagcagggcagtcattaaatcttaaagcttcaaaatcgtcttctttgactccatgttacacatctatgtaatactgatgaaataagtgggctcccaaggccttgggcagctccactcctgtgactctgcaggttacagctcccgtggctgctttcatggcctggtgttgagtgccagtgctgtttttaagcacacagtgaaagctgttggaggatctatgcaagctgttgatgggtctaccattctgggttctggaggatggtggccctgttctaacagctccactaggcagtgccccagtgcagactctgtgttggggctctaatcctaaatttcctctctgcattgccttagtagtggttcttcataatggctccacccctgcaaaagacttatgtctggacattcaggtgttttaaacatcctctaaaatctaggcaaaagttaccaattctcaacttttgtcttctgggcacccacaggcccaagaccacatggaagccaccaaggcttggggcttgcactctctgaagcaattgtctgagctgcaagttggccccttttagcgatggctggagctggagcagctgagacacagggcaccaattcttaaagctgcacagagcagaagcctgggccccactcatgaaactatttttgactcctagccctccaagcctttgataggagcagctgctgtaaagatatctgaaatgccctggagacatttttcccattgtcctggctattaacatttggctacttgttacttatgcaaatttctgcagccagcttgaatttccctccagaaaatatgctttttaaatttttctttttttttttttcttgagatggagtctcaccctgtcacccaggctggagtgcagtggcacgatctcagctcactgaaacctttgcctccggggttcaagcgattgttgtgtctcagtctcccaagtagctgggattacaagtgtgcaccactacacacagctaaattttgtaattttaatagagacaggattctgccacgttgaccaggctggtctcaaactacttgcctcaagtgatccgcttggcctcccaaaatgctgggattataggcatgaacaaccatgcctggctgggtttttaatttctactgcatggtcaggctgcaaattttccaagattttatgttctactttccttttaaacataagttccaattttagattatctctctcaagttcaaacttccacagatctctagggaaggggcaaaatgctgccagtctcttagctaaaacatagcaagaatgacctttgcttcagttctcaacaagttcctcatctccatctgagaccacctcagccaggatttcatcatcaatatcactataagcattttggtcaaaaaacattgaaaacctctctaggaatttccaaactttctcacatcttcctgtcttcttgtgagccctccaaacttccaacctctgcctgttacctagttccaaatttgcttccacattttcaggttaactttatagcaggaccccactctgctggtaccaattatctgtattagaccaattttacactgctataaatatactacctgagactgggtaatttataaaggaaaagggtttaattgactcacagtttcacacagctgtggaggcctcagaacacttacaatcatggcagaaggtgaaggggaagcaaggcacgtcttacatggcagaaggagagaaagccagtgaggggagaccttccaaacacttttaagctatcagatctcataaaaactcactcactatcatgagaagagcgtggggggagccaccttcatgatccaatcacctctcatcaggtcccttccttgacacatggggattacatttcaagataagatttgagtaaaggcacagaatcaaaccatatcagcctctcacttaggtgacgtgactctatttttttggcccttaactcagggaatattgggacataagactgtattcagcccctatgtcatgtgactctcttctccttcctggactccacatatatcatgtattgttacatattgctgggttcaacacctaggtgattcaacccagtagtatcttttcattcatcactgatattacgtgactctttccgtcacataatgggtcctcagtcttgccaaataaaggcattgtgatatttcacttaatcctagcacctaggtgatgtaacacttctcttttgtctggacacttgcatatttttggtagtgtaacatatcacttggcccaacacctagaatataggaggtttctgccagggccctgcctacaggggggcctgtgacatatttctcctggctgtggaacccagtacctaagaaatgtacctcttctgcctgcagtttgccaataagaaatgttatgatatattgatgggtccagcaaccatgtgatatatctctcctgctttggcctcatcaacagagagcattgtgacatacccgcgagccaagcacacagatgatgttattctgctgcctgtgccctgctttcaggagtggattgcaatgtaacactggctgagtacccaggttaatgacactgttgcctggtccctgttctcagggaagactgtaatagacccctgacccaatatccaggtaatatgactctcttgctcactcactacccacagttttgtttgtgacatatatcttggccaagttcacaggtgtaatgatgactctcatacttcaaaccagtaaatagaagagatactgtctcttgttattaggtattggcaaatgagtagaatgctaggtctcctctgcacaaatgttatagaggtattccactcttttaaatatggaataaagctcctcagtggcacagagtgtttcagcacccaggtgagattgtgttttctgcatgcacacttttcaaccactttgaatgtcaccttcacacatagacagagcccacttctgaggtcctgaattaatacatgacttgtgtacttatatccaacatactgaaagtgcttactctcatacctagaaccaggacatgtgcagaattgttaatccttttactgaacctccctgtatttttgattgggacatatgcctttgaaaaacattgaagtaatttgactcttgttctttgacccagccttcagatgggattgtttcatatagctgaaccagcacccatgtgactcttttctcctgccttgagctgcacacagggggcattgtgacataatgctgggtcttgaacacaggttatgtaagaatccttttctattttggtacattttgagatggagtttcattcttgttgcccaggctgcagtgcaatggcacgatctcggctcaccacaacctctgcctcacaagttcaagcaattctcctccctcagcctcctgagtagctgggattagaggcatgtgccactgcacctggctaattttgcatttttagtagaagtgggttttatccatgttggtcaggctggtctccaactcctgacctcaggtgatccgctcaccatggcctcccaaagtgctgggattacaagcgtgagtcaccacacctggccatcttggtattttttacagagggcattgtaacatattgctgggccccacactaagttttctgtgaatcttttgtggcctggcacacttactgtgacatatggctgcgtcaaacatgcaggtgatgtaactattctgcctgagccctctttacagggagcattgtgacatatctctgtgtctgttaccccagtgatgtgactctcctctgcctgattcctgctcacaaacagaattgtgacatttttgctggacccagcctctagcttatgtggctctattctcctgtcttggtgctgcccgtaggggacattgtgacatacttcttggccatgaacccaggttatgtgagcctttctgtgccctgcccatgtggacaattgtgacatattaccgagtcctacacccaggcgatgctactctcctgtctggtccttgcctacagggaacattgtgacatatctctttgccattcatccaggtaatgtgggtcttttggtttttcttgttttccctcacaggggagattgtgacatactgctgggcccagcatttggttatgtgactctatattcctgtctcggagttacccacagagggcaatgtgccacatcactggaccttacatccaggtgatgtgagtctctttttctgccttggcactgccccacaagggttacttgattctcctgcttgtggtctgccctcatgggtcattgtgacatattgcagggtccaacacccaggttatgtgactctcttgcctgggccaggggaacaggggtattgtcacatatctctgtgtctatcactcaggactcttttcctgtctggtgtctgctcacagaggagatttttacctatcaccgagttcagcacttagctgatgtaactcttctctgcttcctaggttctgcccacagggaagattgtggtgaattactgaacgcgatacctagatgaaggtactctttttcctaggccatgccctgtgaagacattgttgcatatttctttgtctagcaccaagctgatgtgagtctctgccttgaccctacacacaggaagcattgcaaaatatctctgtgcccatcaactatttgatgtgacccttatctcttatatgactccttctttaggagatattctaacatattttttgggctagcagtgaggtaatgtgactctcttcttctgcttgtttcatgctcacagaagggagggtgacttattgctgaacccctcacacaatgggcacatcacacaaacagatgtgtcacaatgacccctgtcaacaggggtcatggtgacatatattcaggacagtattctagataatgtgactctcctcttcttcctggtacttgtctgcagtgacgattgtgacatatagattggtacagtacataagtgatgtgagtctcttttcatgagcacagactcaggatgtgagtctgtgctttgcccattgaagagatcatttcatatagctgctccctgaccttgattttgtgactttcctctttttcctgagttctacctgcagtgggcattgtgatatatctctgggacccccacctaggtgaggtagccctcatgcatgggtcatcctttcagtgggcattgtgacacatttctggaccgagtacttaggtgatgttactctcctcaattgcttttatgctgccaatgacagatgatgatgttttgctgggccagacacctcagtaatgtgactcttctctttgggctatgccctgcattcattgcatattgtgacatattgctgggcctaacacctagttgatgtgactctcctgaatgggccttgccatattttcactaatcacctaggtgatgtaacattcctcttctgccacggcctcaccaaaagtgggaattgctatatatgactggactcagcatctaggtgatgtgactccttttttacctgatcataagatatactgggtattgtgatatgtcactgggcccaacacttatgggacagaaggctcctgcctcagccctgcccggagggggccttgtaacattctctacatccataacctaaaaaatgttactctcctattctgcctacaccagccaacagaaaaatttgtgacacattactaggcccaggtgacttgcttctcttgcctgggccttgccaacagaaagcattgtgaaatacagaaaacaccagcacaccggtgatgttactctgtttcctgtgccctgctttcaagaggaaattttaacatatcactggccaagcacccaggtgctgtgtctctcctgcttggtccctatttccaggaaatattgtgacatatttctggctgagcaaacaagtggtatcactcttctgctccctacttatttacagataaaattgtagtatgtattatggcccaggtaacaggtacaataatgaatctcataccttgaacagctaataaaagagatactgtctctcatagccaatcataagaaaaagagtaagaaacttagtcttttctttgtacgagtgtcataaagaattaccactctgtcacattttgtaaaagatagcacagagagaagcattacagggcacagcacaaacatgaggttgtgttttctgtatgtacaactctccaaccattaggattgtcactctcatatatagacagaattcagtggtggtgatttgaattccacacatggaataagtctacagctgaatttgtgactgttatacatgaatatctggccacagttggaagggtgactcatttctaaacccagttcataagcaagtaatggctttcccatctggtcccagccagttagagagatattgactcccatagctgtgcttagtaaaacagatccaatctgtggttcatatcaacatgaaggtctcaaagcagattgagactgtcatacatatcatataaagaccacaggtgatacagagattgtactaacaaggcccagaacacaaatgaaattgtgacattcacatgcacacccagccaacagtaaatatttttatgctctcacataaacactgcccacagttgaggttctgaatcctacatctgaaggcagtcaaatgttagaaaattgacttgtatacatagatctggtccacaggttcattgttgactttcacactatgattcagcacagcagtgagtcagtgactttactatgaagacacagggtacaggaggaatcgaggctgtcttgcagtccactgttgagattgtgattcatgtacaccgactcaacattcaggaggtgttgactcttagacatagaactggaacatgtgtagaattgttaatctcacccctggatctttctgcaactattattgtgacatatgcctctcccagcccctgagtgatttgactctcttgttggggcccagctgacagatgggactgtggcatattactagactcagcacctaggtgaggtgacattattcttctgccttggcactgcctacttggggctttatgacatatgtctgggttcataactaagatgaagatttctcttatcttgccttgtctttgctcacatgtgagatagtaacatattgctggactctgtacctagtggatgtatctttccttcttctgagttctgctcacaggggagattgtagcatatcactgggctcaataccaaagtaatgttactcttgtgacacattgtgacatattgttgggcccagaaccaaggtgatgtgagtctcttgcatggagcctgaccacaggaaccatcatgacatatttctgaaagctcaactctttgatgtgattatattcttatacctgctctttgcccataggagagactataacatacctcttggcccagcacctagttgatgtaactctgctctcctgcctgggccacacctacagaagaaagagtgacttctcactgggccagcacacaggtcatgttattttactgccttgatccttgtccacaataatcattgtacatagttttgggctcttctactagaagacgtgagtctcctcttcttcctgggatctgtccacaggggggattgtgacatatcatttgacccagcacctatatgatgtgaccatcatctgatgccttggcccttctcactgggctgattgtgacatataactgggcacagcttctaggttatgtgactcttctcttcctcctgggtcctacccataggaggcattgtgacatatctctaagcacttaaactaggaaatatgacacttttttctgggctctcccctaagagagtactgtgacgtatttctggacccagcacctaggtgatgttacacttctctcctacctgttacctgttactggcagcaaatccatatgggcatggatctgcagcaaccttaattcttacctcctaagaagaaaaaactcaacttagaggcataaggcagaaggagagactgaggaaagttttagaacaggagtgacaactgtagaacagaaacaaaatgaaggaaagtacacttggaagagggccaagtgggtgactaaaaagggaagtgcacggtttgacatttgacctggggttttctatgttggcatacttctggggtctcacattaattctccccattgcctaactcctgagatcttattgggaagttgctgattaccagttttaggtaatccactaattgtctgcttgagaggagaagagatgctgaagttaacagtgggtccctcttcatccttggggttctggaatgaatcagtcttaccatgtacccctaacttttcatgcccttatcaagaagcaatgtttatttgaatcaggtgggcaaagtgtttcaaaagtcactggaaaactcagttctgggacataataggaataaaaagtatacagtaagtcataagaaactgacagagccagagttcaaattggtgcctgtcctgacaatgtgccagcagacacggaagggttggaggtcatctgagcaggtagggtaagaacaagtataaatctcaggggatatccacaagggagccagtgtctttgctgccatgcaaatgcagtaaaagccatggatgcttaaataacagggagtttgtgtttaagaagtcacatggcacgtgaagtgaaagcaaagaggcagatgtgccccggaagcagatagtccagcaggtgagtaaggccatttctgaacacacacagggaacacaggagaatagacagtgcaggttttggggaaagagacaattttagtaggaaccctaagacatttcatggtgttcagctttagccctattactcttgagagtctcctgtccaggagggccataagtgcatcagttctactcagcatggaccccaaggttcttcccacccctgcaaaccatctgtcagggtgagcagagagatagcccatggaaacagagccacttgtggctgagaggaatcattctgggagctggttagtaagccatagagtgaaagggaaaagaaaatcatatagaggggttagctgcctctagccaatgaaggtgaggcataaaggtctttcaccactaggggacatatctgagtcatgcacaccaaagcatgttagcagcaaaaggtaccaagtcacacagcaccaaaacatgttaccagcagtgaatccgcatgggtacgggtctgtagcaacctcatttcttgcctcttcagaagaaaaaattgactgaggggcttaaggcagaaagagagactgggggaagttttagagcaggagtgaaagtttattaaaaagctttagaacaggaacaaaaggaaggaaagtacacttggaagagggccaagcaggtgacttcaaaggcaagtgagcggtttgactttttgactttgggttttatatgttggcatacttttggggtcttgtgttacttttcccacctcacccaactcctgagatcttattgggaagctgctgatcaccagtttcacgtgctttctatttaggagactgtctttccctggtgccggttgtcaccaattattactttagagagacagttaacaactgcctgaccatcacctaatggctgactgacactcctggtgtgtgtgttgagggcggagtcctctcttgccctgctcatacctcactggctacctactttaacactgcaagcattgtgtaatgttggtaaaggagttagaaagaaattatttaggcagatagtgagggtaaaagagtcctcaccagaatttttcttctaacaaaaagcagcccaagaaattttctttttcaatcatcagcctgaaaaattgagctgcaaaaacagataagcaacctggaagtttttatgggggaatgccagcagttgtgttaatagaaaagggcaacctgggggctgggcatatccaaaatgggggctccatctttccttctttgtgaccatgtatacggtaaagaaatcggcaacatggtacccaccaggcaaagaacccatatgcataataaagaattagggtgtggtggccagctttttgttctctatgcaaatggcacacctggtccaaccaatcttttgcaccctatgtaaatcggacaccacctcctcaagcttatctataaaacctcctgcatttcaccatggaaccagtaaccaatctctgtgggactcctctctactgcagagagctcttctctttctttgcctattaaacttccactcttgacctcagtcttgtgtgtctgcatccttgattttcttggtgtaagacaagaaactctgggtatcacaccagacaataaagctgcttcattgtgactctcctgcatggatatatatatatacacacacggatatatatatatatatatagatatatatatccatatatggatatatatatcgatatatatatctatatatggatatatatatctatatatggatatatatatggatatatatatctatatatggatatatatggatatatatatggatatatatctatatatggatatatatatggatatatatatctatatatggatatatatatggatatatatatctatatatggatatatatatggatatatatatctatatatggatatatatatggatatatatatctatatatggatatatatatggatatatataactatatatggatatatacatctatatatggatatatatattgattatatatagatatatagatatatatatggatatatatatctatatatggatatatatggatatatatatctatatatggatatatatggatatatatatggattatatatagatatatatagatatatatatggattatatatagatatatatagatatatatatctatatatggatatatatgatatatatggacatatatggatatatatatggatggatagatagctagatacagagagagacagtctcattctgccacccaggctggagtgcagcagcacaatcttgtgtcattgctaactctacctcccaggttcaagtgattttaatgccccagcctcctgtgtagctgggattacaggtgtgcaccaccatgcatccatccatctttctttctttctttctttctttctttctttctttctttctttctttctttctttctttctttctttcttctttctttccttttcttctctttctttcttctttctttcttctttctttctttctttttctttcttctttcttctttttttctttcttctttctttctttctttttttgtattttagtagagattgagttttgccatgttttccaggctgatctcaaacttctgattacaaaaaatccacctgcctcagcctcccaaagcattggaattacaggcatgagccatcacagctgtctacaatatacttttacatttatgatttaggtgatgtgttcttctctttctgtcaggtgcgggatggttaaatatcactggacctagcacctagggaatgtgactcttgtcttttgcatcagccccactcgttttgagaactgtaacatatcactgggccaaacacctagaagatgggaagtgtctgcctatgccctgcaaacagggctttagccctaccactctcaagagcctcgtgacatatctctgcattcatcatctaggagatgtgactcctccctgctgcctgcgctctgcctacagggaagaccataacaacatttggcccagcaacacggtgatgtgttttttcccagggccttgctcacagggagcattgtgacatatcactggaaccagcatccagggctgtgactctgtgtcctgctgttagaacaggattgtaacatatcactgaccaagcacccaggtgatgtgactcttctgcctggtgcctgccttcagggaaaattgtgacatatgcctggcctagcaccaaagtgatgtggctctcctgctacctctatgcacaggtgggattgtgacatataccttcattcagctcataggtgaggtgataactctcataccacaaaccaaacagtaggagagatgctgtctgtcaaagctaagcttacagaaatacacaagattcagggacttttctttgtataaacattatagtagattactgctctcttgtatataatataaacttctcaggtggtacagagagtgtcatcacagggcccagcgcacaggtgagaatacattatttgtatgcacgccccaccacccattaggattttcaccctcaaacatggaaagagcctactggtaaggtcttgaatctcacacctggatgcagtctacagttgaaattgtgattgtcataggtgaatatccagctgcagttgagatggtgactcatttctaacttagctctgaggcaggtgaggactgttttatttggaaccagccaattataaagatgttgactctcatatttgagcttagttctacaggtacaatcatgggtccataacatcatgaaggtcatagagcagtttgcaactctcattaatactgtagaaggctcttgggtggtactgagagggtcttagcagagccccgcacacaggtgagattgtgacactcatatgcacacccagccaacaataaaacttttcatctttccacatgaacacagcccactgttgaggtcctgagtctcccttgtgaaaacagtgcaaagttgaaaaattgactcttatatgtggatttggttcacagatgggttggtgatgctcagacaaatattcagcacacctgtgagtctgcgactccagtaatcatccacagtctgcaggagaaattgaggctctcaccaacaaatcaagtgcacaattgagattgcgactcttgtactcagacccaacatacagaatgtgttgactctcaattttaaaaccagaacatgtgtgagattattaatctgatctctaaaccatcctgcaagtgtgattgtgacacaagtctctgttcagtacttgagtgatttgactcctttgcctgggcccagtccaaagatgtaattgtgacatatcactgaaaccagcatataggagatgtgtctccatactcctgccttggtgctgcccacagtgggcactgtgacatatcactgggccttgtatccaagtgatgtaagtctcttctttcttgatactgaccacaggagacactatgacatatccctgggcctcaagctcagcttatgtcattctcctatttgttctctgtccacatgggccattgtgacatactgctgagtttggcatccatgtgatataacacttcagcctcagctttgctcacttggggcattgtgatgtatctctgcacccatcacttagatgattcaactcttttcttctgtctcatctgtgcttaaaacgggcaattgttacctattgctgggtccagcatgtagctgatgtgtctcttctcatcttcctaaggactgcctgcaggggatatggtgacattttactttgcccagcaccaagatgacttgaatctgctgcctttgttctactttcagaagacattgtgacatatcgctgggcctagcaccaaggtgatgtgaatcttctgcctggacctgctcacagagggaattgttacatatttttgacttcatcaactatttgatgtgactctcctctctaacctgggccttgcccataaaaaacattgtggcttatctctgggcccaaaacctaggtgatgtgactgtcttcttagggtcatgcccacagtagagagatgccttattgctaaacccagcacacaggtgaggtgattcttctgtctggtccctgcccacaggggtcatgatgacatctctctaagcccatcacctagattatgtgagttctctttttcttctgttagctatatagaagattgtgacatattgcttggcccagacctcatgtgatgtgaatctcctctcatgccttggtcctgtttttttttggccgttgttgttttgttttgttttttgagatggagtcttgctctgttgcctaagctggagtgcagtggcataatctaggctcactgcaacctctgcctcctgggttcaagttattctcctgcctcagcccctgaatagctaggattaaaggtgagtgccaccacactcagctaatttttgtatttttagtagagatggggtttcaccatgttgattaggctggtattgaactcctgacttcgtgatcaactcgcctctgcctcccaaacttttgggattacaggcatgagccaccatgcccagtcaagatgatgatacatttctaaacccaggttataggcaggtgagggttcttctacctatacacacgtttaaagggatgttgaatctcacacgtggtctcagggccacaggtacaagcatgggtcttcaccagcatgaatatctcagagcatactgcgactctccagtgtaatgtataaagctctcaggtgggacagtgtcctaacaggatccagaacacagaaaagatgttgatgctcctatgcacacccaggtcacagtaaaatatgtcattttcccacataatcatagcccaatgttgagattctgcatctcacacctgaaagaagttgaaagatggaaaattgactctcttatatagatctggtctacaggtaggttggtgacattcagatcaaaattaagtacacttgtgaggctataactcttctaagaagacacagctcacaggagcaactgatgctcctatgaacaaatccagtccgtgattgagattctaactcatgtacttattgtcaggcctctgagcccaagctaagccatcatatcccctgtgacctgcacgtatacatccagatggcctgaagcaaccgaatatccacaaaggaagtgaaaatagccgtaactgatgacattccaccattgtgatttgttcctgccccaccctaactgatacgatatattctccctctgccctgaagaaggtactttgtaatagtctccccccaccttaaaaaggtactttgtaatattctccccacccgtgagaatgtactttgtacacctatcccaaacctataagaactaatgataatcccaccacgctttgctgactccttttttggactcagcccacctgcacccaggtgaaataaacagccttgttgctcacacaaagcctgtttggtggactctcttcacagggatgtgcatgacacttagacccaacatacagcaggtgttgactctaatgactagaaccaggacttatgctagattgttaatctcatccctgaaattttctgcagatgtcattgggacatacacctgtgcccaacagctgagtgatttgtctctcttgcttggtcacagctcacaggggccattgtaaaatactgctgatcctgttatccaggtgatgtgagtcccctcacctgctttggcactgcccacagggaacattatgacatatgactgggacctgcacccaggttatgtgacttttatgtttgtgctctgcccacataagacactgtaacgtattgccagtccaacatccagatgatttaactctcctgcctgagctctgcctacagagagcattgggacatatcccttcacccatctttcaggtgatgggactctatgttcttgcctggtccctgcttacaagggatattttgacatatcactgggcctagcacctagcaggtgtcttttctcttctgccagagttctgcccaaagacgagattgtgacatatgactggttccaacagcatggtgacatgactcttttgtcttgaccctgccctcagaagacattgtgacatattgcttgactcagcatcaaagtaatgtgagtctcctgcctggactcttcccacaggaggcattgtaacatgtctttggatgcaccaatcatttgatgaaactctactctcttatttgggatatgcctattagagagactgtgacatatatctgggctcagcacctagacgatgtgaatcttgttccatgcctgagcactgcatatattgtgtattgtgacacacggctgagccaacacctaggtaatgctgcttttcaggataggttcttccaactgtagtattgtaacatatcttttcatttatcttctaagcgatgtgactcttttttctgtctgggccctgccaaaaaagaagaccatgacatatcactggacccaccacctaggtgatgtgagtcttctcttttacctgggcctctcatattttgagtattgtgacatattgctaggcccaacacctagggtatgggaagctcttgcctaaaccctactcgcagaaaaccttgtgacgtatctcttcatacattacctaggagatgtgactttcttctgcttgcaccctacccataggaaacattgtgacatatagctaggagcagcacccaggtgatgtgactctcctgcctggtctctgtccttagggaatattgagaaatatctctagactcaaacccacatggtgtgactctgctgctcactccctatccaaaggtggaattgtgacatatgtctttactcaggtaacagatgtgatgatcaccctcattcctcaaaccttccaataggagaaatactgtcttttgtaggtaggtactgagagtgtcagcacagggcacagcacagaattgagattgtgttttatatatttacactgtggcagtcattaagatgatcaccctcacacatagactgagcccactggagaggtcctgaatcccaaatgcagatgcaatctacagttgcaattgtgacagaacagtcagcacctgttaggatagtgattcatttcagtaggcaaagacttttctatctggaatccaccaatcgaagagatgttgaccctcatgcctgggcttaaagccacaggtaaaatcatgaatccatactagtatgaaggtttcagaacagattgtgactctcgtgcataccacataaaacccttgtgtggtacagagagtgtcctaacagggctgaggaatcagatgagattataacacctgtatgcacatccagctgatagtaaaaaattgtcatcctcccacatgaacacagccctcttttgaagttcttaatttcataccctgtggcagtggaaagttggaaaactgactatcatccatggatccaatccacaggtgggttgtttaacctcaaacattcagcacacatgtgaggctgtgactccacaaagaggacagagtttgcaggagggattgaggctgtcatgtatggatctactctctcattaagattgtgtgactcctgcttttagagccaacacacaggaggtgttgactctcataaataaaacctagatgggttcaagattgccaatcacatccctggaccttcttaggtgtcattgtgacataagcctctgcccaggaccttagtaatttgactcccttgcttggggtcagacaacagacagaaatatgacacatccatggacccagcacctaggtgatgtgactttattcttttgctgtggctccacccgtagagagcattttcacacatcaaggtgctctgtacacaggttatgtgactcttttgcctgtgtccagacaacgttggccattgtgacatattgcagggtccaacacccaaaggaagtaactcttatgacagggttctatctacagagggcactgttacatatttctgtgctcatcattcagttgatgtgactctcctctcctgcctgggccatgccttcaggagagtgggagatagggagagtgacttattgctaggcccagaacacaggtgatataatacttcttccaggtctccttcttcaagtgttactataatatatcgttagtcccatcacatagaagatatgacacttccgtttttttctgcaacttatgcacagtgtggattgtgaaatatgacttggcttagcacctacatggtgtgattctcttctcatgactaggtcttatccactgcgttggttgtgacataaagctgggcccagtcactaggttatgtgactctcctctttttcctgagccctacccacaagaggcattaagacatatctctgggcccattcaccttggtgatgtgaatctactccctgggacaccccccccaggggtattatgaaatattgctggacccagcaccttgtgatatgactcttctcttttgcctgggcattgcatacatgtgtattgtaatatatcgctatgttaaacacctgggtgatgtgactttcctgcataagctctgtccataggcatatgatgatatctcattttgttcatcacctaggtgatgtgactctactcttttcctgagccctgcaaaaagaagagattgtgacatatcactgaactgagcaccttggtgatgtgactatcctctcttgctcaagtgtcacatattattggtattgtgacatacctctgtgaccaacacctatgggtaggaaaacttccacccagactcagcccaagggaccctcatcacttttttaaaagatatgtgacttgaaaaatgtgactgtcttctgcctataccctgccctcagggaagattgtggcatattactgaactaggcaacctagtgatgtgtctcttctgacaggggtttgcccacatagacaattgtgacatatcactgggctcaggacccaggtgatgtgactctgctgcctgttcccaacgttcaagagaggattgtaacatatccctggccaagaactcaggtgatttgactctcctgccttgtccctgtcctcagagaagattgtgatatatcttcagccccaaacccaggtcatgtgacttccccactcgctccctattcagaggagaaactattacatatatcctgggccagctcacaggtgtgatgacaattctcatacctcaaacaagccaatagaagagatactgtttctcattgctaggcttagaaaaactggtaaaatacctgtgtctctttgtatgaaggtcatagagaactaccacaaacttgtatatggaataaaacccttcagtggtacagagagtgtcatcacatgtcccaaaacaaagaggatattgcgtttcttgtatgcacatccagccagctgttaggattgtcaccctaacacctggatacaacccattggtgaggtcttgtgtctcacatgcagatgcaatctacagtttgattcctgactgtcatatgtaaacacctgtccaaagttgggatgctgactcatttctagacccagctcatagacaagtgaggactctcctgtctgggtccagtcaatttgagaaatattgacttttctacctgggcttagggagcagtacaaaggtctcagggcaaattgtggctctcattcctattctacaatgatcttgggtagtatagagaatgtcctaacagggttcagcacacaggtaagattgtgacagtgatatccacacccagctgacagtaaaaattgacatctttcctcatgaatacagcccactgaatacagcccactgttgaggcattgaatctcataaccaaaggcagtggaaaattgaaacattgtctcttgcttgtagacccaatccacaggtggattggttactctcagatcaaaattcagcacacttatgaggccatcactccagtaagaaaacagaatttgcagaacaaattgaggcttccatgcacaaattcagcccactactgagactgtgactcatttacttagacccaacatataggaagtgttgactcttatacctagaattgggacatgtgtaagattgttcatcttttccttagactttcctgcaggagtgatgctgacatgttcctctatttggcatctgagtgatatgacccttgccatggtctagcccacagatggaattgtgatgtgttgctctacccagcacctaggtgatgtgactccatttttctgccttgacactgtccataaaaggtattttgacatatctctgggatatgtacccaggttacatgactctcctgcctgtgtcctgtccacaaattatgaaatattactgggtccaacacccagggatgtaactctcatgcctaggccctgccaacagggggcattatgacaaatctgtgtgccaataacccaggtaatgtgactctctttttttgcatggtccctgctcacagggggcattatgacatattgctgaactcagcatctaactgatgtgattctcctttctactttttgcccacagtggagattgtgacatatcactgggcctcaaactaatgtgatgttacactttcatttttgaactgaactcagaaggcactgtgacatattcctgggaacagcaccaaggttatgtgagtcttctgcttgcactttgcccacaaaaggcgttgtaacatatctttagacctgtcaactatttgatgtgacttatttttttaaagtgaaagcaagtttattgagaagtaaataaacaaaagaatatctactccatagatagagaggccctgagggctgctcattggctctttttatggttatttcttgattacatactaaacaagggatggattatttgtgagttttccaggaaagggatgggcagcttccagaaatcagggtgcctcccctttttacaccatataggatacctgcttaacattgccatgacatttgtaaagtgtcatggtgctgttgggagtgtcttttagcatactaatgcattacctttagcatataatgagtagtgaggactaccagaggtcactttcattgcaatttttcttttggtgtttttttgctgtcttttgtactgcatcctctttcatcagaaagatctttctgaatggtaccttgtgctgacctcttgtcttatcctgtgacatagaaagtgtgatgttctggaagtcaggaattgtgttaattcctttctttttgaggtctcaggataacttgggactgttgggcctgtcagaaagtgacattccttacttaccacatgtcaggaaccctgcacagggactttgtagacaatgtagaaggccaattttcccaaggccaattttagagcttttactggctctaaaaatcaagtatgatttctcgaagaaaagaccattattccagtcaaagccttggtaaaataacctgtgtctcccattgtgtcctgttgcaaatgaaaacatgcttattgcacttaagcaaataactatattgccataaattaagaatactcaccaatatctttgcacattctggagaaatcagggagagagaaacaaatatattccaaattatgtttacaggagtctattttcctccatcgttaaaagctgtaaatagctcaaaagtgctcttgactctgaaaaacaaaggatccacaacattttaagcaaaaagccaaaaaatattacttccatcttttattagtacagttcatgcagtaaactcttgttctccttgatatttattagctttccatgagagtcttgaaagtttttctcctgttctaattttgcagtcttcaaagttatcagaaatttacatttaaaagcacccatcaatgttccatagcatactataggtcatcttttgaaaaggattaaaacaggacaacaattgtctgtgggtgataaaaaagccttagaacagccattattaaaaccacaattgacggccgggtacaatggctcatgcctgtaatcccagtattttgggaggtcgaggcaggtggattacctgaggtcaggagttcaagaccagcctgaccaacatggaaaaaccctgtctctactaaaaatacaaaattaaccaggcatgatggtgcatgcctgtaatcccagctactcaggaggctgaggcaggagaattgcttgaacccggaaggcagaggtttcagtgagctgagatcgtgccattgaactccagcctgggcaacaagagtgaaactccatctcaaacaaaacaaaacaaaacaacacaaacaaaaaccacaattgactagaaatattggttactcttgtggaataaaaaattttacataacaattataactattagtaacatactatacactaagtcatatgagacttacaggagtattccataattttagaacactcaccaatgacttatttgtacaaatacaaccccaagaaagccaaataccatttcatgtttgacaatatattctatataacttttataccaaataaattgaatatgtcatttttggactttaggtgacctaatatctaaaagattaattaggtcagaaaagacaaaatttataatttaattttggaaagtttttcaaatagcaaaggtttaaaacattttacattataaaatcaaatcccaggtcaccctatgtcattcatttagccaaaatggtaacttttctttttaaaaaaatttttaaaagccagaaacctttacttattaacagaagaaagacttagctttccaaacaatctgtctcttgtctttttgctgtagtttattcaaaagacaaaccaaaatctttcattttttacatatcacatgaatatcttgttcaagagtgaaagtctatatttcacctttgtgttagtatactaatgatgccaaacccatttcttaataaaaccttatatacaaacatatgaaatcttaattagtttgactataaggtaagattctcagaaatcttttaaaaccctttaaaatgtttgttgaagagcaaatctgtgctctaagaaaaacctgctgtgctcttattctaatgttcaatttatggaaaaactgagtaacatctatttaactttagccagtatgttcacacacagaattttttatgagattaattttttagaaagcttccagaacttgttcaaaccttcaggtttattctaattttaaacaaacctttagatctctgacttaggaaccaaaattaacattcttatgcctttttttaaatcttaagctgaaagcacattctacttttcttacacaccttgcatgtaaagctgtttttatttcccaaagattacttatgtcacatgaactaaaaggcattcacacatgcacacagtgcactgatgaggtcttcaacctcatgggtggatgcagttcagttggaattgtgactgtcatatgtgaacatccagccacaattgggatggtgactcatctctaaacccagctcatagacagttgagaaatctatctgaaccaaatctactgaagagatgttgactctcatgaatgagcttagggtcacaggtacaatcaagggtgcatgctagcatgaaggtctcagagcagattttgactttcatgcgtaccatacaaatactttgaatggtagagatggtgtgcccacgaggcccagcacacaggtaacattgtgatactcctatgcacaggtagtcaatagtaaagactgtcatttttccacatgaatacagcccactgttgaggtcctgaatctcccacccagaggcagtggaaagttggagaattaactctcatgcgtggatctgatacataggtgagttggtgactctcaaagactccccacggctgtcaggctgtgacttcactaagggaacacaggtttcaggagagatttagtctcttgtgtacaaattcagtcccttgttgagactgtgactcatgtgcttagaccaaacctacaggtgttgactctcatacctggaactggaacatgtgtgggattaatcttatccctggaccttcctataggtgtgaatctgatgtatgcctctgtccagaatctgagtgatttgactctcctgcctgggtccagccttcagcagagatcatgacatatcacgtggtgcagcacttagctgatgtaacctattctcttgccttggctctgcccatagaaggcattgtgatgtattgccaggcccttcacccaggttatgtgatttctgcctgtgccctaaccacattggctatattgacatattgcactgtccgatacccaggtgatgttacttttctgcctgggcccttcctacaggggacattataaaatatctctgtgcccatcacctatgtgttttgactttcttctcctgcatggtttctgatcacaggaggaaatgggacatatccctgggctcagcacccagttgatgtgactcttccttttttttctatgttctgctaacacaaaagatactgacatattgatgggcccaacaccaaggtgatactactctttcactttggccctaccctcagaaggcatggcaacatattgctgggcccaaagcaaaagagatttgagtcctttgcctggaccctccttgcagggggcattgtgatatatctctgggtccattgactgtttgatctgagtctcctctctttcctgggctttgcctatagtagacactatgatgtatctctgggctgtgcacccagctaatttgacttgcctcttctgtctgggccatgactacagataagagtgatttatcaggacccagcacacaagtgatgtggttcttctgcctgctttctgcccacaggcatcattgatacatacctgtggtcccaaaaatgcagataatgtgactcttttttagggcgggaagggatatgtccacagtggggattttgacatattgcttggcacagcatttatgttacttgactctcctctcatgcttaggctctacccactggggtaattgtgacatatatctgggtgcagcccctaggttttatggctatcctcttttccatgatccctactcatagcatacattgtgacatatctctggttttctcacctagtttatgtgactttcttgtctatgcccttccatcacagggtattgtgacatattgctaggcccattatctagatgatgtgactctctttgcttgcctgtgcaccacccaaaagggacattgtgacacatctctgaaccaatttcctacataatatgcctcttcattgctgcctgagaaatgcccccaaagaggattgtgacatgtctctgggcccagaacctgaatgttgtgactctcctgccttgacatagaggaaatattatgatatgtcactcggccctgcacacaaatgatgttactctcctgcctgggccttgcttatagaggggattgagacattttacaggtgaagaattcaagtgacatcattctcatttctcagcctttcctgcaggtaagattgtgacatattacttagcccagcacacagatgaaatttttccgcttgtatgcaaacccagccaacaggggctattgtcaccataacacatgaataaagaccactgttgaggtcctgaatcttatatgtgaacacatcaacagttggaatcgtgactgtcatatgtatatcttgccgtaagtgggatggtgactcatttctggactcagctcacaggaatagtgatgactctgatacctggaccaagccagtaagagagatgttgactctggggtcaacctagacttaggggtctgggtcttttacttgtaggaaggcaacagaagattatgaaacttacacatatggtataaagctcttggggaatacagagtgtcattacagggcccagtccacaggtgagattgtaaccctcctatatacatctggccaacaatttgaattgccaccttcacatatagaccgagcccattgctgaggtcctgaatctcacacataaacctatttcaccattgaaattgttactgtcatatgtggattcagccacaggttggatgatgacaaatttctgaacccaacccacttgcacaatgaacccagccagcagaagatgtgttgattttgaggcttagggcaagaagcaaggttttgtgtttctcacttgtatgaaagtcacagaaaattttcaaactcactcatgttgtataatgccctcaggttgtacggagagtgtcattacataactcagcacaaagtggagattgtgactctcaagcgcacaccaagccaagagtaaaaattgtcatagacacacatagacagaacccactggtgaggtcttgaatctcattctcagatgagtctacagtttgaatttttaatgtcatgtttggatccagccacaggtgggagagtgactcatatctgaacccaactaagaggcacagtcatgattttcatacctggacccagccaatatgagaggtgttgactctcatacctggacttaggaaaagaggtaagatcatgagtttataccagcaccaatgtctcaaaggggattgtgactcttgcccaaacaatgcaaagccctatggaggtaaagagagtgtgataagaggacccagaacacagctgaaattgtgattcttatatgcacttccagcccacagtaaaaagtgtcaccctcccacatgaatagagaccactgatgagcttctgaattgtacatctggatgcagttgaaagctggaattctgattctcgtatgtgcattttgtccagaggtagatgatgactctaggatcagggttcatcacacaggtgaggctttggctctgatatcaggacacagcctgcaggtggaattgggactctcatgcatgaatctagtccatcattgagattgtgactcatgtacttggatgcaactcacaggaggtgttgactcttttacctgaagctgggacacatgtggaattgtgaatcttagccctggaccttcccacaagtgttgtgacatatactttggcctagcacctaagtgattttacttccctgcctggacccagccctcagaggggattgtgacagatacctgggtcaaacacctaggtgatgtgactctcatgcttgagccctatccacagagggtgctgtagaatatcactgggctcagtgcttaggtcatgtgtatcttattttcagccagggccctgcccacagagccattgtgagatatcactgagcccagcacctccgtgatgtgactgtatggcctgggccctgcccacagtaggtattgtgacttacctctgaactcattacctaggtgatgtgactttcctcttttgcctgcattctgccccctcaaaatggcctgtgacataccacaggtcttagcacttaggtgatatgattctcctctgctgcctgggccctagccgtaggagagattgactcattttactgagccgagattgcaggtaatgtaagcttctatcctaggccctgcccacaggaggtatggtgatatatctctgtggccataatttaggtgctgtgactcttctattctcttcaggccatgccagttgagggggattgtgacatatcgttggaccagcacaagggaaattgaaaactcctgcctaggccattcccatagaaggcattgtgacatatcactggtcacagcacacaggtaatttgactctccttcctgggccttgcccataggagatattgtagcatatctttagcccagcacttaaaatatgcgaccctcctagttggtttcttttccacaggtgagaattttacataaaactgcacccagcacacaggtgaaattgtgactcttggatgttcatccagccaacagttatgagtgtcatcatcgcacatggacagagaactctggtgaggtcctgaatcttgtacacggacatagtccacagttggaattttgactgtcatgtgtagatccagccacaggtgtgatgttgacctgtttatggagttagctcacaggcacagtgagaactctcatatcttgacccagtcaatagaagagatgctgactcttatagctaggcttaaggaaattaatagggtcctgggtctcctacctgtatgaaagtcacagaagattatgacactcatgcatattgtataaagccctctggtggtatagagattaattaacagggcccagcacacaggtgagattgtgactttgttatgcagacaccgctgacagtaccatcaccctcacatataaacagagcccactggtgaggtcctaaatttcatgccctgacacagttcacagttgggattgtgactgtgatatttcaatctgatcacaggtgagatggtgactcatttctggatccagcttagaaaatagtgaaggctctttcacctggactcagccaaatggagagacgttgactctgttaactaggcttagggcagcacataaggttctaggtctcctgcttgcataaaggtagcagaggattatgacactatacatattgtacaaagtcccccattggtcctgagagggtcataacagggtctggcacacaggtgagactgtgactctggtatgcacacaggcagagtaaggattatcaacctcctacatggacacagcccactgttgagattctgaatctcacaaccagaagcagtcaaaagttggagttgtgactctcataggtggatgtggtccacagctgagatgatgacctcagaccaggaggcagcacacctggaggctgtgactcctctaccgagatgcagtctgcaggtgtgattgtggctgtcatgcacaaatccagtccacctttgacattgtgacacccttactgagacccagttcacaggaggagttcactctgatacatagagctgggacatgtgtgggattgtaaatcatatcacttaacctttctgcaggtgtgattgtgatatatagctttgcccagcacctgagtaatttaactctcttgtctgagcctggcatacagttaggatcttaacatatacctgggccaagcacctaggtagtgtgacttttttttgggccctgccctcagggataattgttacttatcactaagttcagaacctagtgatgtgacatttctctactgtcttggtcctacccacaaaataaaattatatcactgggcccagcatctaggtaatgtgcctctactctttttcacaggccctgtttacagtgggctttgtgtcacatacatgagccctgctcaaaagcgtgatgatgattctcatacataaacccagctgatagaagcaattttttactcacatagtgaggggtaggacaacaaacaaggtcttgtgtcttttacttgtacaaaggtcacagaacatttttagctcacccatgtgtcatacagtcttaaggtagtagagagagtgctgatacaaggcccacctgaagatgagattgtgactctcctatgcacacctcgctgaccattagaatcaccacattcaaacatggagagagcccactggtgacctaaattttacatgccgatgcagtctgcagttagagttgtaactgtcatatatgcatttggccacaagtaggatggtgattcattattggacccagctcacaggcatgatgatgaatcttgtatctggaatcagcaaaaaaaaaaaaaaagatatattaattcacatagctaggcttagggcaaatggtaaggtcctggttcccctacttgtatgagggtcacagaagattacaaacatgtttataatataaaggccttgggtggcacagagagtgtcacagcaggacccagcacacaggtgagattgtggctctcttaaacacacccagccagcagttaggattgtcaccctcaaacaggaacagagcctactggtgaggtctagaatctaaagtggaaacacggtccacagttggaattatgaatgtcatatgtggatctggccacaagttagatgttgacacatttttgaacccagctcacagtcacagggatgactctcatacctggactcagccaataggagatatgttgactctcaggcttagggcaatgggtaagatcatgagcttatatcagcactatatcttataggaaatttcaattcttatgcatcctgcataaagctctggggtggtatagattgtgtcataacagggctcagcacgagtgggattgagacccttgtgtgcacatgcagccaaaagtaagaactgtcaccctctcacatggacacagcccactgttgaggttctgaatctcacattcaggggtattcaaaagttggaattgtgattctcataggtagatttgattaacaagtaggatggtgacaggtaggatagttaggattgtatcttcaggccaaaatttatcacacctatgaggcagtgactgcccccactgaaacactgtccagagttggtgttggctttctcaggcactgatccagtccatggttaaaaatgtgattcacattcttgaacataactcacaggagtagttgactctcatacctgaagctgggacaagtgtgagattgtaaatcttacgtctggaccttcccgcgggatgatcgttacatatatctttggcagagaactgatgaattttgctctcctgcagaagccctttctatagttgagattttgacatacaccttggtgaagtatctagaatatgtgatgctcctgcctgggctctgccctcaggggggattgtgacatatctccaggacatatatgtaggttatgtgcctctccaatcctgcctaggctgttcccaaaaaaggcattgcgacatgcctgaacccatcacctatgtgatttgactctttttttcccctgggccctgccctcagtggggattgtgacatgtcactgggcccatcatttccatgatgtgacttttgtgttctgctttgaccctgcttgcaggaggattgtgacatataactaggcccagcacctgggtgatgtgactctcatttcctgcctgtgttctgccaacagaatagattgtgacatatagctgggccaagcacccaggtgatgtgactcctgcctacagtggccattgtgacacatcttcttcctgggtcctgtttatgagtgggattgtaacaaatctttggccaagcaccaaagtgatgtgactctcgtttggtttctgctcacaggaggtattgcgacatatatctaggccaagtttagaggcgtaatgatagccctcatacgtggacccagttgatacaggagatttggcctctattttctaggcttagggcaatgggtaaggttctgggtgaagaagcataaggttctgggtgaagaaaggtcacataagattatgacaagcatattctctaaagcccttgtgtgacatttagagattacaggatccagcacccaagtgaaattactactcttgtagacaaacccagctgacaattaggattgtcaccctcacacattgacagagccactggtgaggtcctgaatctcacaggcacagtccacaattggaattgtgactttcgtatgtgtactgggacagttgatatggtgacttatttttggagccagcttacaagcactgtgatgactgtcataaatatatctgaccaataagagagatgttgacacatacctggtaatagaacaatgggtacgatcattggttcacaccagcatgaagatctcaaagcagattgtgactgtcgctcataccacataaagcccttgggtggtacagagagtgtcataacaggacccaggacacaggtgaaattgtgactttcttatgcacactcagccaacagtaaacattgtcaccctcccaaatggaaaccatccactgttgaggctgtgaacctcacatgtgcaggtagccgaaagttggaattgtgactttcgtgaatacatcttgtccacaggtaagatagtgactcaaagaccaggattcagcatgcctgtgaggctgtgactcgtatactgagaaacctgcatttagaattgtggctctcatgcagggatgcagtccactattaagactgtgactcatgtacttagacccaactcacaggaggtcttgactctcatacctggagccagaaaatgcgtgaaagtttaaattttatttctggatcttttgctggtgtatttgcaatatatacctttgtccaatgcctgaaatatttggtcctcctgctggggaaaagcctgcaaatggaattgtgacatatacctgagccctccatgtaagttattttactctactgcataggtcctcaggggagattgtgatatatcactgggcccatcacctaggttaaatgattatcttctttggctgggccctgccaacaccaagagttgtggcatataactggacacatcacttaagtaatgtgactctccttttctgcttgggccctgtacacagggtggattgtgacatattactgtcacaatactgtgtcccgcacacaggaaatgtaacttttctaactgaaccctacccacaagaggcattgtgacatactgttaggcccagttcccaggttatgtgacttcactgccatggccctgcccagagagtggatattgacatctttttggtccagcattcaggtgatttgattatcttgcctattccattctcacaggttaaatttcaaactatgcgtgtttcccagctcacaggcattatgcccatgctcatatagaaaaccagacactaggagtgattttgactctcttagctagattttgagcagtgggtaaagtccgaagtctcctacatttagaagggtaacaaaagttgataaaatgtgtgcatattctataaatactttgagtaatatagacagtataataagggcccagcacatagtgagattgtgactctcataggcataccaagccaacaattaggatcatcacttccaaacatgacagtagcacactagtgaggtcctgaacctcacatgcaggtgcagtccacagttaaaattctgattgtcatatgtggatctgagaacaggttgaatagtgactgatttccagacttagctcagaggcacggacttgcatacccagacctagccataggagatatgttgactctcacaggtagccttaaaacaatgggaaaggtcctgggctttctacttgtatgaaggtcacaaaagattacaaaactcatgcaaattttatgacccccttgtgtggtacagagagtgtcataacagatcccagcacaaagttaaaattgtgattctcataggcatacccagccaacagtgaggattgtcactctcacacatcaacagagaccactgacgaggtcctgcatatggcatgtggatgcagtccacggttcaaattgtattgttcacactcatctgtcactgggtgctgggttcatgatatatgcattttgtaaaaatttataaagctgttattttataatatatgtgctttttatgggtgtaaaattaaaaacataatttttgatttttctatttatctcatgtttcttccacaatcaatttttgtcacatacttttctggaaaatagataatttcatctaaattttcaagtttaatgtcatgacattttaaaaaatattatgtttgaatcttgaatgtatctctaaatatcctcttttgtcttttgtaaaatttttctcctcttgaaatagtttatctactttattattacattcaaagaacagcactaattttactcagatgttattatccctgagtaacaaatgagtcggagaagtcgagaaacttgcccaaggttacacaggtactctgagcctgctcttctaaccactgaacacatggtgtcatccaggaaacacatatgcaatactatttctaaaggtacataaaatcacattatacacatgcaaatatgtgtaaagataaaatgaacctatacagtgtttacctgcagaaaagtcactggttgagggtgtagaaggtcacatggaagaagccttctctgtttttactgttgttttgttgtttttgtagagataaggtcttgctatattgtctaggctgttctcaatctcagctcaagcaatcctcctgcttcagactcccaatgtgctctctgtcatatttttaaaattacttattgggtcaagtgtgctggctcatgcctgtaatcacaacattttgggaggccaaggggaaaagattgcttgagttcaggcatttaagacaagcctgggcaacatagtgagacctcatctcaactaaaaatagaaaaaaatagctgggcacggtggctcacgcctgtaatctcatcactttgggaagctttttcttcaaagattaaaaacaaatcttggtgtctggcagccaggtaaggtgagggcaggaggcagaaacttgcaatccatggggtgcgttggctttttcaacattatttttctccccgactacacagaaaatttcttcagtgtttgatcttatgcatctttgaatccaaacatctcattctttgccttatacatattaaaaatgtattcacagttcataaaacataatcaatctatcaaaaaatattccaaactaaaaacattctttttatagaacctagtaatgcaccttaattccttacaatttgtgttgagaattactagtattatgatgttttctaacatgtatcaagtacttttagatgtttagcacttgagatatattataaaaaccttctcaatattaacctgggactccaaagaatatgtatggcccaaacagttgttttcttcccaacaccaaggaatggcatacaagattgtcttcaagttgaggacaggtcataaagaaaaatttttaaaaagagaaaaaaaaatctgcaaacttgtttctacacatgggtcttacatacatttcttcatcaattatattaattctgaatgaaccatattacctgaagttgtacaaataattgcttcaaattgtagaatccccaggaaacagaaagaagcaaaagcaaacactcccaaagaaagttacatctattccagaccttgatgaaccttgcaaacaattttccattatgtgcaatgactagcaagcaagcaagcaaatatgacaaagttcacaataaataagatcgtgtgaaagacaccagaaaaaaaaaacataacagaaacaaatctgcaaagacatccaatattagaattatcagacacaaaaaatcaaaaacaactatgcttaccatatctaaaaaagacaaatgaacgtatatgcaggaaagaagaaactatataaagattctaaaaataagttgtaaaatgaataatacaataactaaaataaaaactaaccacatttgaacttacatgtacaagacagaaccagtaaactagatgctagatcagtagaaattaacacatatgcaacaaatatcagtgccagaaaaatatctggtaagtattctaagcattcaaaatttaaaactgaaaagcataaggttgatactatttaacctttctaaaaattagaataggtaaaaatactgcacaactcaattcctgagttaacatcaaagcttgacggagacaaaacaaggacaatgatagacaatctcattcataaagacaatttttttttgagactgtgtctcactctgatgccctggctggagtgcagtggcccaatctcgactcactgaaacctctgcctcccaggttcaagcaattctcctgcctcagcctcctgagtagctgggattacaggcacatgccagcatgcctggctaatttttgtatttttagtagagacaaggttttaccatgttggtcaggctggtcttgaactcctgacctcatgatccacctgccttggtcttccaaagtgctgggattacaggtgtgaaccatcgcacccagccaagacaaaaattttttaaaccaattacaaacaaagtgactctttctcggtataaaatgaataaaaccatcaataagtttatctcaagagtacaggataagttgaacattgtataatctacatgtctacataaaataggcacagaataagagcttggtaactagaaataaaagaatattttattttattttctaaatatacaaggtatttcaaataaagtacagcaaatgtacataactactgaaagtttgtcttttaatgtcataaacataataattatgttggtgttcaagatttttattaaacattgcatccatggtttcagccaacaggttaaaatgagaaatcagttacacaattatactggaaaagcagaactagtcaataaactaatagctaaactattggttctacctaggtagattggatccttgcaaagcaactaacacaaaaattgttcatgtatatcgaggatttaaaacttctaggagaggctcggtggggtggctcatacctgtaatcccaccactttgggaggctgaggtggcagatcacgaggtggggagttcgagaacaacctggccaattttatgtagcaagactgaaagttttataagagtaaagagcaatattttttttctccattttatctcctaaagctagcaagaagtatggcacaacgtgtgtgctcaacacacatttatcatttaaatgaataaatacatcccctttgtaaatggtcaagctatgcaaaccaagacttttttagttattattgtttagttgatagaatcaaatctaaggtaataaactgtaaaattcagaaagcactattaaaagtttgatgttacctcatcattcttaggtaaaatagagtaaaaattttagtctctaagtttgtgaccattaaaaaattaaattgccacgtgagaatgaaaaatgaactctcactttaggcgagcataatttgagaggaaaaggcgaaaaagaaaagaaaaactgaaaactcgattgggtcagatatgccagttctactctctctctctatatatattttggaaatagttccctcctctcctgacgcagagggaggctggctgggggatcctgggtccctctgtcctccccgcggtggcagtggctgatctctgctcaggcgtgaggggtgcggccgtgcgctgggcttgagcctgcccggcccagcccctcctcacttccctggactcctcacggtgtctacgggcccctgcacaatcctgagcgtccctctgatggaaggggaggtggcagcagaaagccagtgggagaaactggccccgcaggtcgaggagggctcggccagctgtgggaaatgctctggttgacctcggatttctgcgcactaagctgagccgcgaccccggctttgagccgaggcatccccgggctgggcgaccgtgggcgtgggcgctccggctgctgcggcggttcctgctgtgctcagctgggtcacgactggaactggcgccctccggaagtgaaggaggtgccccgcagaggaggcggtagccgtggtccctgtaaaccaggccttgctgacaaatgtcagacgccaagaacagaagaacggagagcttcagccaaatggaggaactgctggagcggctgagggtgaagctgcccaaactcctcaaagtggagcagcaaagcaaacaccagagaaggacaagaaaaatgaaagtcaaagaaaattagcagaaaccaaaggcagacgctaacgcagtgcaaaacagttcacatcatgatagaaagagttgatgagtctcggaaactaatcttagtgacagaacgaaaggacagcagtgaacatggtaaggtgctgacgattctggtccactggatcccaccatccctaggacagtaaataccatcacagtcaccacacagtgagttacaactgcaccatttcctgtttattcctaaatgaataaaggtgattctcaacacaagtgcaaataaaaagttatttgtttttttttaaactaaagtgtcatgctttagcttttttttttttgagttcttataattttgaaaatgaagttgacatttgtatggcttatgaagtttttgatagtcttgcattagttgaattgttcaaagtaagtatattttaaactaagaagagtcaattgtatttgttttacatattaaaggctcaaagtaacaaataatgtatctgtttatgatttgaaaagttcaaagtttgattatttatccgtacatacacagaatagtgtatcgtgctaaaacatttgttttttaaaagtggcagccatagttcctgcctgcctggatatattttggactttagtatgttaaagacaacgtaaaaaaaaaactttattatgttttagaaaatctaagattggtatacacaaactttacaaattgctgtagggttcagcaaactatgtttataatgtgacattaatacctctacattttgatgtgtaaatctttcttgagaaaagattgttttttaaaaaaatgtctacaaattcaggcttcagttataaaatgacaaaatagtaaagaaatgagtggtttgccgtatgatatgaatacaggcattcaattaaaataccaaatattttaatgaaaagtttttagacaatagacttaaataatttcttgatattttactacagtaataaatattcacaaatattttataaatcatatctattagtactaggttttacttaatagtagtatatatataagatcaaagatctgttaaaaatagatatgtttatcagtaatttggtgtttctaaatacccagaagtcttgttttaatcagattagctctggggatagtttactaattttattttataaacagtgtattcaaagttttctagtttaacctaatattgattgatgatgggtaaacaaatctcttcttgctaatcccataggtttattaaattgttgaagatatttttaatttaaaaattctgtcttcaatgttgtttacagggatttaggtctagtttaacctgctcaacctgttaatcagtgtaggtgccagattccaatttattttcagtgtgtttgtatgacttttctttctttcttttctttctttttttcagacagagtcttgcactgtcatccgggctggaatgcaatggtgcaatcttggttcactgcaacctccgcctcctgggttcacacaattctcctgcctcaaccccctgagtagctggtattacaggtacacaccaccacagccagctaatttttttgtatttttagtagagatggggtttcactatgttggccagactggtctggaactcctgaccttgtgatctaccactgccagcctcccaaagtgctaggattacaggtgtgagccaccgcacctgaccaactttggtctttgaataaaatgtctattaacaaagacaaatttctgcacatttatcaagttgcttgtagtaactcgaaacgtaatatatccaaaattctcctgttattgtctgagaaaacagattctactgttacctaaaaaatcaactggaaggcacttttataaccttgcaccacgtaagaaaaaaactgcaatgcagtagtaataagtgtagatacatcaaatgaaaaatggtaatcgagaatgtcactttcaatgtttgagtatttggactttggttttaaaaaatgtagtaaaatagagcttttggtaagctttctgtagattaacattatcataaattaggaaaaaatcctttaaaatgtaaataaacaaaaaaatacactgaacaacaacaacaacaaaaaactaagatccagcagtgcatacatatttgtccttattttgggagagtatgaaacagaccattgcatgaactttatacagatgttttgccacagtggcatactaataaaaatgatttatctttaatttgaattaacatgtccacatcttaaaaatactgctttgtactaagaataataaatgtaaaagtctttatacacaggaggatcctgatcctcaactaaacatatgtggcaacccattcctctgtttcttccaaactgaagcctgactaaggcttaaatatagagtgagagagactcattaacaggacatgtgaaacaaaaaaaatgagataggatggtcatttctaaggctcagcaattgcctgggggacctcaatataatgatatcaactatgagtcttactgggtaaaaataaacataaaaagctgagaacatcatgactttaatttggtggaatagagtctctggaattatacacagttgtgctaaaagtattgagccagaatgatatgtatctgaggattattaaagggaatatttacaaacacaaaagtatttgttccatatcttgttacagtagcagtactcttgtctgtaatgtcagcttccccaagctacagatgccatagacaaactaagacttagtgtctaatatgttgtttgcagttagtttctaaatttaaaaaacttgcaataattttatgaatttcattaaatgctgtttcatgtataaatctcactaaaaggcactattcagtagatatttccctcagtcttttctgggattttctgctccttgtttccaaaccaaccttatttgaatcctaggcatttctgaagcccaatatgtaataacagaaagaaagcagaaatgaagccaagttaccccaaccagtccatgcctaatatatttggctccccaaatgaaccaaaaaccacacaagctaaacaacagtggatttaaaattcaacctaaattcaacagtagttgtcaaaatcatatgcaaaaattagcaaagtcacaatgtagaaacccttaacctgttattccacaacaaatcatcaaattcttattttggcatttttagaaaaaataaatatattacatatgacaaaatatacccactcacttataataaaatattttgaaatatgcatggttttattcttattcttaaatatatactatattatttagacaagactttcagtaaaaaatacttacagctaccgtgtatgaattaaaacagctatgggaaaataggatttttagttaataatgaagattgaagctccaatgatgtaaagtattgtttcccgggcacacagctaattacccaaatcaagctgaaatatgtttgatttaaaaattttaattttcccactgttgacaatgttgacataacagctaaatcttagtctcagagctggtagtttggaataaatcaagacaagtactattgaggaaggatgggtagtcaagaaagtgactatgtctttgggatgcagcaaacatggccattgtacagtggctgcatattgccaacacaataagccccagcattcgcattgtattccagcttattcaagcaaagctctctccaatagagaaactcccctgtaaacagcatgcacattttgattttacctttcctcaaactgaccttttactcattataatagtaaaaagcacacctgtgggtggagatttaagatgctagtgagatgtgaaaaatgaacaagcatgtacagctactgtgtccgtgcatcaagagggccatccagaacatgcttactaataacaccactttccacctctttataaataattatataagactcccataaaaaagtccctagttccagtctttgctttctcattccataagcaacacaccctgaatcccttctctctcaagatgtactgggtattctgcacctaacctttaaaatagacttactcctttgcaataaattactttatgctgcatcttctttgtgtttgtctcttgtttaaatttttttgaaactaaggcaacaactgaggtttcagaaaagccattcacactatcatgctttgttttgtattttttgttatcaacattttttctcttacatgtcaatattcacattttaaacacagtcaacactgctaaattgaaaatttaaatgaccacaaaataatttatcataaaagcatgtatatctctcatgtttcaccttcaccacactatctattcaactttttaaaaaaatttgatggtcaaatacatatatcaaatttaatattttatttaataatttgaattcaattccaaaatgatttatatggaagtatattgttatatttacttttgaccaaatttggctttccaagctaaggtaaaactaaagcatgttttcaatgtgttaaggaacttaaccttactagcattgagagacattagctagcttgccttaggtagatagcaaggcaagggtttatggagagcccccaacccccaggttagtgccttatccccacatagcagaaaaagcagcttggaaaaaaaaaagctccagacactgttaagggaactagcacagggggttgtgcctggactcatgccctcggatgcacaagtaggagaacctaaagcccatttagataaaaatttgcacacacctctggcttacttagataatggagcaaggcctgacatagaaatgtctgctctttgcatagtcagtgggctcccaggaaaaagttttttctttttgtgggcatgaacacagtgggctttgatgggttctgtggacactttcttttcttttttaactgtgagtctggtatttataaattattactttagcccttgattggtcgtgggccaaggtctttggccaagcttttgcatcagcttctaataggttctgggccaacatgagcagcctttatggatcattacttcagcccctgattggtctcaggccaaggccccaggcaaagctgagtcacacattctctaagacagctcacaaactaagcacaattttttcccattccagtttgtaaaaaccctggatcacagccttatagtggacaacccattcaggcctccctctctgctggagtaggacttttttctttttgcatattaaacttttgttccaaacctcacccttgtgtccacactccttaatcttcttgaatgtagcacaaagaattctgggtattatctcaaacaacagaggttgttacatcttggtgcactgataaaactataacatattttggtgtgttggccagggagaaaggaattcatcagaagggtgattaggagtgagggtcattgtcctcagttactttctgaggcttcttgtcctaagtttttgtctcttagagacaaacctgaaaacattggctctgttctaatccagtttcctttcacgaagggcctacccattgtgtggaacagaaaggaggtcctatggcaactgaaggtttctggttgagtctatacctcagtgttacctaaaagcccttggaccaactccagtccccaacagccaatgaaggtgttggcacaagaacttccagtcttttttttttcatttcattttttttcttcttcttcttttttttggtacctataatttctcctattcattctttgtatgcaatgttgtgaatgtttttacagcctatggatataatcatgctgagtaaagtcagtcagtgtcttagtcatcagatatgtaactcagagttgttgttttataatttcctagcaacagggcgaattcaaaatatctctaaatttttactcagtaagggcctttctctcccacagtaatacagtaataaacattcatggcactgtatgagagaatatttcaccctgagtaaataccctcctttgcatttgatttgtttttttctctccatgtgaaagctcagcactatccaatgaatctaaacagttcctttatgagacaagttcatttttgtttgttctggggcatatgctataggaacagcctatcaaaacccaaacctccttctaacttttgcctaaaaatataaagttggagtttttacctaggatttctaattttacagcacccctagtggaatgggattgttctccataggaagccttgtcaatgctccctccaaaacttacagtcccccaattattttcccttttacatccctttatcactgataaggcctcatgccctatttctaaacagaaaaactcaactttcaacagctggaagaagccatgctgacaaaacaaatcttcaatttttacacatttttaaggcacatgttcttcatcaaactacactggaatttgaacaaaaaggaattttatgttgaaggtaaactcatcccattctctgggattctgatgttttcctggggccatagcaggggaagccaaaaatggtattagggcattccctctataaaagtatcttgcctaaatccaactactgcataatctctccccagccactggagtaccttgagagtcttttgggctgagtggatctagaaaacgagcgggatggaaagctaggtgagaaggtgagcataacgtgtcctgccaacgagctcctctggacccatgggtgaaggtcatgctcgcatccatgggtaacatctatgatggtggctgggaaccagagggaaaaaaggaaggtcgagaagtggtatgccctttttctctttccgccacaccaaaaagagaaaggggactgaggaaagccttgtctcccctttttctagataggtaacaaaccgtctacagtttgcattcccctctagtgcattctgaaacactggaacctctttaaccctgaaactctaaagaaaaaatggcttatattctgtcgcacaaacccatggccatcttagagacaggaggcctggctttctaagggaagtattaatttcaacactacccaacaaatagatctttctttgccctgtgagacaacccagatctttgtaagcattgtaaaattaaatctgccctcttggcagccctacaaaatataattaccaaaagttgagatacaaacccttggggaaccctaaatgcaacttccaggtgcctcaccagcctcccatattttgggcccccaatacccatatatcatcagctcctctggttgtgccactgaagaaacccacataattgctgttgcccctacagaaaatgcccaataaacatggtgttactatgattcaagttcccttctcattgcaggaccttaagaaaataaagtgagccccaggaaagttctctaatgaccctgatacatatatagagtctttccaaaatttaacccaatgtttaatgttacatggagagatgctatgctgcttttaagccaaaccctaactgttaagaaacaagtagccttacaggcagcaaaaaaactcaaaaaaacaaacagtaggttacctagagccagtcagaaaagaaactcagttgaaagggaaaaaagagacagaatccccattcccaatgagaataaaaacaatgacccttaaatattctaattggagtccttgtgatcctatggagaagtggaaaagaaaacacttcctgatgtgcatattagaaagcttgcaaagaaccacaatcaagcatgttaattactctaatctgtccctgttaaatcagaaaccagataaaaatcccctggcctttttgaaaaggctgagaaaaactttagtaaaacaaacctccctgtgttctgatatgacaaaaaaggtttattacttaggcaggctctaatatcagaaggaagttgctaaaacaggccctgttcaaacatatttctaggttttgtcatccttaagttgaaactttgcagtatttaaataacactgttctctgtgccccaactgaagaggtctcaggaaggcactaagactttcctcaatttattagctgaaagggaatatagggcctcaaaatttaaagctcagctctgtcaaactgcagtacagtagataggtctagtcagaagatacaagaacaccggataaagaaagaattaaactcattttcttcttttcctttcccaaactcattggggggaccttacacattactggtttttgcaaactctgggtacctaggaatgttaaaatagccaatcttttataccaccttattaaaaaaactcaagcacctaaaaactcactcgctaacttgggaacctaaaactaaaaagcctttaaccaactaaagcaagccttacataaagcaccaaccctcagtcttcccataaggaaggcatttaatctctatgtatcaaaaaggaagttaatgaccctgggagttttaactaaggcttaaggtccagctcaacaaccagtgggttacctaagcaagaaacttgacttgatggctagaggatggccagcctgcctctgagcagttttggtgatggcttgctggtatcaaaggccacgaggttaacaatgggaaataactatctgcattcccacataggactgctgtcctctaatggaagcctctgactaaaaaccacttcctgaaatatcaaattttgctgctaaggtgatctgcagtctggttaaaaacctgcccttgcctgaactcagccactttctcccagaggaaactaaagagcctaaacaggattgtaaacaggtagttgtgtaaactggtaaaagatataagaagaatcactgcttatattctctgtaaagttttaattaattaaataaacatttttaaagtgtactcaacttaatgaaaagcgaatatccaagctataagtatattcagaaagcctttctatttttatctatataaaacttgttttcctggaagaggattttttctcacttaactaaattacttttatccactctttcttgtcactgttgatgcaagcatagaaggccctaaaataacctctggtggcctgggactcctcaagaaaacaaaaaagccaccataaattgcattttaaaagatctctgctttttttcatgaaacccctagaattaaaagtaataagttcctctccaaatctgtctctttcttctagctatgcttgtttattaggccctggaaactatatgcctagccctgttcttttttttttttttttatgcaggacagagtctcactctgtcacctaggctggagtgcaacagcacaatcgtggctcactgcaacctccacctcctgggttcaagcaattctcctgcctcagcctcccaagtagctgggattacaggcatctgccaccacacccagctaattttttttatttttagtagagatggggtttcaccatgttggccaggctggtctcaaactcctgacctcaggtgatccacccgcctcagcctcccaaagtgctgggattacaggcatgagtcaccatgcctggcccctagccctgttcataaaaggcctcaaccagagaccaataatccaattagaaaactggcaaacaaaaaatcttatagttactgaatcttcttctgtttgtctagatggttatatacgtgttttgtgtgatgtctataaaaaacctctaattaattggtgtacaaataagcacttagataaaatgttaagtcaaaattaaaggctgtagtgcctcttggttcatgcaacttcaatatttaagaaataaaaacattcttgtagaatacaaacatcttaaacatgtaaataggtggtctaaattatgcaggtcaaatattaggtttgctaaatgttttaatgtaaactgcttctttggcccttgagtactgtcaacctgccagcttcacaattagtaaggcctagtgacatattaaagtaaccatgcccctaactatactggaagaagtcagactttatctgctcctagcacataattaaaaccacttaccaggttttacattaaagttaaaattacaaaaagttaccattataacatgtaattgaggctactgaaaatgaatgtgtatgcaacgtgtgtaaaaacagtaaaattttataataaaaaattataagaaggcataaaaatctacatttttcctaggagtaaaagattgtcttaaattaaataaagtgaaagttttaagcaaatttttgaaataccaaaaaattaattttgcaaaagaatactctgtgtaaaaatattaactaaattcaaaggaatatcatatggtgttccttaaaattaagcatttaatgaaagcacaacaaagctttcttaagatgctcatctgtacatatcaaaatttctaaaagattataaaagatttgtaaaaatcggagatccattccaagatggccaaataggaagagctctggtctgcagctccaaatgtgattgaagaagatgatgggtgatttctgcattttcaactgaggtacatggctcatctcactgggactggatggacagtgggttcagcccatggagggtgagccaaagcaggacagggtgtcacctcacctgggaggcacaaggggttgggggatttccctatcctagcctggagaagccaggacagactgtacttggaaaaatgggatattcccacccaaatgctgtgcctttcccaaggtcttagcaaccagtagacaagaagattctctcccgtacctggctcagcaggtcgtgaacccacagagccttgctcactgctagcacagcagtctaagatcagatggcaacgcagcagcctggctaggggaggggcatccaccattgctgaggcttgagtagctaaacgaagtggccgggaagcttgaactgggtggagcccactgcagttcagcaaggcctactgcctctatagactccaactttgtgagcaaggcatagctgaacaaaaggcagcagatagcttctgcagatttatatgttcctgtctgacagctctgaagagagcagtggttcacccagcatggcatttgagctctgagaatggacagactacctcctcaagtcaatccctgacccccatgtagcctaactgggagacacctcccagtagaggccgacagatacctcatataggtgggtgcccctctgggacaaaccttccagaggaaggatcaggcagaaatatttgcagttctgcaataattgccattctgcagcctctgctggtgatacccaggcactcagggtatggagtggacctccagaaaattccaacaaacctgaagctgagagacctgttagaaagaaaaccagcaaacagaaaggaatagaagcaacatcagcaaaaaggatatacaccaaaaccccatctgtatgtcaccaacattaaagaccaaaggtagataaaaccacaaagatggggagaaaccagagtagaaaagctgaaaattctaaaaaccagggcaccttttctcctccaaaggatgacagctcctcaccagcaatggaacaaagctggatggagaatgactttgctgagttgacagaagtaggcttcagaaggtcggtagtaacaaacttctgagctaaaggagcatgttcaaaacaaacacaaggaagctaaagaccttgaaaaaaggttagatgaatggctaactagaataaacagtgaagagaagaccttaaatgacctgatggagctgaaaaccatggcatgagaacacgatgcatgcacaagcttcaatagccaattcagttaagcggaagaaagggtaccagtgattgaagatcaaattaatgaaataaaatgagaagacaagcttagagaaaaagagaaagaagaaatgaacaaagcctccaagaactgtgggactatgtgaaaagaccaaatctacatttgatacgtgtacctgaaagtgatggggagaatggaaccaagtaggaagatgctcttcaggatattagccaggagaacttccccaacctagcaaggcaggccaacattcaaattcaggaaatacagagaatcccacaaagatattcctcgagaagagcaactccaagacacataattgtcagacttaccaaggtaaaaatgaaagaaaaaatgttacgggtagccagaaaggtcaggttacccccaaaaggaagtccatcagactaacagtggctctctcagcagaaatcctacaaaccagaagagagtgggggccaatattcaacattctgaaaggaaagaatgtcaacccagaatttcatgtccagccaaactaaacttcataactgaaggaaaaataaaatcctttacagacatgcaaatgctgacagattttgtcaccaccaggcctgccttacaagagctcctgaaggaagcactaaacaggaaagaaacaactggtaccagccactgcaaaaacatgccaagttgtaaagaccattgatgctaggaagaaaccatcaattatcaggcaattttgttgatcttttcaataaaacagctcctggattaattgattttttgaagggttttttgtgtctctatctctttcatttctgctctgatcttagttatttcttgccttctgctagtttttgaatgtgtttgctcatgcttctctagttcttttaattgtgattgtagcatgtcaattttagatctttcttgctttctcttgtgggcatttagtgctataaatttccctctacacactgcttaaaatgtgtcccagagattctggtatgttgtgtctttgttctcattggtttcaaagaacatctttatttctgccttcatttcattatttacccagtagtcattcaggagcagcttgttcagtttccatgtagttagcagttttgagtgagtttcttaatcctgagttctaatttgattgcactgtggtctgagagatagtttgttgtgatttctgttcttttccatttgctgaggagtgctttacttccaactatgtggtcaattttggaagaagtgtgatgtggtgctgagaagaatctatattctcttgatttggggtagagagttctgtagatgtctattaggtccacttgttgcagaggtgagttcaattcctggatatccttgttaactttctgtctcactgatctgtctaatgttgagactgtggtggtaaagtctcccattattattgtgtgggagtctaagtctctttgtaggtctctaaggacttgctttatgaatctgggtgctcctttattgggtgcatatatgtttaggatcattagcttttcttgttgcattgatccctttaccattatgtaatggccttctttgtctcttttgatctttgttggtttaaagtctgttttatccgagactaggattgcaacccctgctttttttggttttccatttgcttggtagattttcctccatccctttattttgagcctatgtgtgtctctgcaggtgagatgggtttcctgaatacaacacactgatgggtcttgactctttatccaatttgccagtctgtgtcttttaattggagcacttagcccatttacattgaaggttaatattgctttgtgtgaatttgatcctgtcatggtgttagctgttgattttgctcattagttgatgcagtttcttcctaccatcgatggtctttacaatttggcatgtttttgcagtagctggtaccagctgttcctttttatgtttagtgcttccttcaggagctcttgtaaggcaggcctggtggtgacaaaatctctcagcatttgcttatctgtaaaggattttatttctccttcacttatgaagcttagtttggctggatatgaaattcttggttgaaaacccttttctttaagaatgttgaatattggcccccattctcttctggcttgtagtttctgctgagatcagctgttagcctgatgggcttccatttgtgggtaacctgacctttctctctggctgccctcaacattttttcctccatttcaactttgatgaatctgacgattatgtgtcttggagttgctcttcttgaggagtatctttgtggcgttctctgtatttcctgaatttgaatgttggcctgccttgctgggttgggatagttctcctggataatatcctgaagaatgttttccaacttggttccattctccctgtcactttcaggtacaccaatcagacgtagatttggtcttttcacatatttccatatttcttggaggctttgttcatttctttttactcttgtttctctaaacttttcttctcacttcatttcattaatttgatcttcaatcactgataccctttcttccacttgattgaattggctactgaaacttatgcatgtgtcatgtagttcttgtgccaaggttttcagcttcattaggtcatttaaggtcttctctatgctgtttattctagttagccatttgtctaatcttttttcaaggttttcagcttcattgagatgggttcgaacatcctcctttagctcggagaagtttgttattaccaatcgtctgaagccttcttctctcaactcgtcaaagtcattctccatccagctttgtttctttgctggtgaggaactgcattcctttggaggagaagaggcactctgatttttagaattttcagcttttctgctctggtttctccccatctttggggttttatctacctttggtctttgatgatggtgatgtacagatggggttttggtgtggatgtcccttctgtttgttaattttccttctaacagtcaggaccctcagctgcaggtctattgtagtttgctggaggtccactccagaccctgtttgcctgggtatcaccagcggaggctgcagaacagcaaatattgcagaatggcaaatattgctgcctgatccttcctctggaagcttcatctcagaggggcacccggctgtatgaggtgtcagtcggcccctactgggaggtgtctcccagttagactactcggggttcagagacccaattgaggaggcagtctgtccattctcatatctcaaaactctgtgctgggagaaccactactctcttcaaagctgtcagacagggacatttaagtctgcagaagtttctgctcccttttgttcagctatgccctgcccctagaggtggaatctacagaggcaggcaggcctccttgagcagtggtgggctccacccagtttgaggttcccagtcattttggttacctactgaagcctcagcaatggcagaagcccctcccctagccttgctgccaccttgcagttcaatctcagactgctgtgctagcagtgagtaaggctccttgggcatgggaccctgtgagtcaggtactggatataatctcctggtgtgccatttgctaagaccattggaaaagcacaatgttagggtgggagtgtcccgattttccaggtacagtctgtcacagcttcccttggctaggaaagggattaccccaaccccttgcactttccagctgtggtgatgtcccaccctgcttcggctcacactccataggctgcacccactgtccaacaagccccagtgagatgaacccagtacctcagttgaaaatgcagaaatcacccatcatctgtgtcactcacactgggagatgtagactggagctgtccctattcagacatcttgggacttctatcaactagttataaatattcttaacttgtagcaatatagctgtttgcatcagtgaaacaaaaatccattttctatttttgttttcttttgagacatagtctcactctgtctgtggccagcatgcagtggcacaatctcagctcactgcaacctctgcctcccaggttcaagtgattctcctgcctcagcttccagagtagctgggactacaggcatgcaccaccatggccagctaatttttgtatttttagtagagatggagtttcaccatgttggctaggatgatcttgaactcttgacctcgtgatctgcccacctcagcattccaaagtgctgcaattacaggcttgaggcaccatgcccagctgaaaaatccattttcttatgcaatgaaatacaacagaaaaacgctagttcttttaccaaggctctaattgggagggtttgttttcctttaagaaatcaagtttaagttgcaaagccagtaacagcctcttgggaaagctggtctcataccttgtctacacagtcctcatacaaaattcctggactgttgtgagtaaaaaaatgtcactttccaacagacttagaaacactatgctcttggaacctcaaaaatacaggagtttaaccaactcacaggtatttaagggtacaaatccatggcttggcccaactttataaagtcttatctaagatttcttttggaacagatttccatcaaagcctatcaaaaaggcctgtggagagatagttactcttgctgcactatgttcaaatagttaggccaagtataataataaagtctattttgcaaacaattcagtctattgtgagtagcttttttttaaattttattttattttattttattattattatactttaagttttagggtacctgtgcacaatgtgcaggttagttacatatgtatacatgtgccatgctggtgtgctgcacccattaactcatcatttagcattaggtatatctcctaaagctattcctcccccttcccaccaccccataacagcccccggagtgtgatgtttcccttcctgtgtccatgtgttcttattgttcaattcccacctatgagtgagaatatgcagtttggttttttgttcttgtgatagtttactgagaatgatgacttccaatttcatccatgtccttaaagaaggaattttgtgagtagtttctaacaaaaaaaaaactaaaagaaagtaattgtttcaaaacttgtcatacatttctcatgaacttctagtctcattcattgtttcaaacgttttgatgacattttaaacctacccggcttattcctgtaagccaaccagcaatctctgcctgcagctcatcaaaaaaagatagggatgggtaatgtaaaaatctaaatcaatattctagttctaagcaattattctgcaaatctggctgggtgatagaaataaataaggtgccaataacccagagctttcttttatcagaaagtaagatcaagggaactaaccaaagccaagcctcatgcacccaaatcttagcaaatataactatagctaccagttatcagggtgtgtcagcagcctcaacctttttaggtgtttcctgccctccttgtttcatttcaattcatgtcctctactaaaccagattgtttctttttccctaaaaactatcaagctccaagtggtaatgcaaatggaatgatgcataaacacatgtttcttctgagatacttaaaccagccctggaagaaatcttagctgctagaacagtacccctctccagtgaggaatagccaaaaatatcaatgcctattctccctaacagcagttagggtctcccctcctgagaggagactgagagggattagctagttagcctaaggtggacagcaagggaagggtccccagagagcccctaacccacgagtcagtgcctcataaccacttacctaccaagccaggcaaaatggcacacacctgtaatcccagtgactcaggaggctgaggcatgagaattgcttgaacttcggaggctgagattgctgtgaactgagatcacaccattgcactccaccctgggtgacagagactcagtctcatgattaaaaaaaaaaaggaactaatctttcatcaatattttaatagttttatgtctgagcacttaagcatcaaggacaggaccctggatgatgaaaagtgcatatttaaatttataaagtaaaaaatgaccatcagatactaataagtgatgaatacagcaacataatacttcacaaaatcattctgggtatgtttgacaaagaagaatgttacacagaaccttcttgtgctacccatgtgaagtgttcttctctctcactttagtctcaattcccaaccttacaattaccacatactcacatacacagaaaaagaaaaattaacttattttattagaaggccatgattcacattttattctattacatcttttccatatcgctgttataatagtgttgaagtgaaccctctttcaccagaagaatacctttgtgaatgtgaatagactgacactggagaagaccagctcagcacactcacttgaatgatccctttgtttttcaggcagtaaaaatgcctttgaggggggaaaataaagtgactgcggattaagcagacagctatacatggaaaaatatttgtcaattgtttgaagattacactgcatggtctacaacttttaaaatataaaatgcatagcataactattgcacaagaaaatagaataaaaatgatgcagttgaccacaaaggacagcaaagctgtattatagcaatatagaaaaatatatatctactgtcagaagaaggtaacttgaagtatttgagagatgttctctaagaaactaaaaatatgtttagttttagattctgtaaaaaatgtttcttaagcatttttaattttcaaaaaaatttgagctcatattttgtcagcttagtatttatgaataatttaaataaaatagagtaaaatacacattaaaaatagcttttctggtaatacagcagttgaatttttagattaaaaaagtaaaattctacaaaattatatgctgaccaatttaatcagaagcttctttcttacaactgtgagaaatgacacaaagattcaacttttatgttgggtgggagagaaaatgattaccaggggctagaaaattgttgtttcactaatcaatgttgatttttattgctatattgtctcaaattatgttaataataatgtaatggccttgatccaaaaaatgtttaaaaactttattgtttcaatcagccaaaatattaaccaaaagaaggcatagaaataaaggtatctaagtcataatttatagtataaaattaaaatgtttctagaaataaaaaaagagatacataagtaagaaaaggaaaaaaagtggattactcacaataactaaggtatgaaatcaacctaagtgtacatcaacaggtacatgaattttaaaaagtggtatatttacacaatggaatgctctttattccttaaaaagaaaaatgtcttagaggtgggctcagcactctgtgtcttagcaagccttgcagggactctgatgtgtgctgaagtttgagcgtcactggaatggatagtgtccatatgattgcagggtcaccccacctatcctgaatgtcaagaacatcctgaatgagaccagtcagtatattgtagctttttctccagccacaaccagaaagtctttgcttcccctttgccttccaccatgattgtaagtttcctgaagcctctgcagctgtgtgaaactagaaaaagatgcacactcaaaaacctcatttgaaatttccagacagaaagccaagcgtttggagagtctctatggacagttttaaacacaaatgcagaaaagaaagcaaccctattcagtgtgaagatgatgagaatgaagacctttatgatgatctacttccacttaataaatagtgattcctgaatccttgacacagcactcagctaccaatgccaatgaataagaatttgcatcacagttgaaatctgttcaccactccttttgtagatgttctgaattgtgtaccagaagtcaattgttattgggggaacccacccccaatatttcaacataggttctttctattttctgtaagtgtcagctggtctgagaaataaagagaaagagtacaaagagaggaattttgcagctgggcctccaggggtgacatcacatgtcggtaggactgtgatgcccacctgagccacaaatccagcaagtttttattaaggacttcaaaaggggagggggtgtacgaacagggagtacatcacaaagatcacatgcttcaaagggcaaaaagagaacaaagatcacatgcttctgaggaaatagggcaaggactaaaagcaaagatcacaaggcaaaaggcaaaattagcattactgatgagggtctatgttcagctgtgcacgtattggtttgataaacatcctaaacaacagaaaattgggttcgagagcagagaaccagtctgaccacaaattcaccagggtggggtttttttccccaccctaataagcctgagggtactgcaggagaccagggcatatttcagtccttatctcaatcacataagacagacactcccagagcggctgtttatagacctcccctgaggaatgcatttctttcccagggtcttaattattaataatccttgctaggaaaagaattcagtgatatcttccctacttgcatgtccatttgtaggctctcctcaagaagaaaaatatggctctattctgccctaccccacagtcaggcagaccttatggttgtcttcattcgttccctaaaatcactgttattctgttgtttttcaaggtgcactgatttcatattgttcaaacacacgttttacaatcaatttgtacaatactggtcctgaggtgacatacatccttagcttaggaagataacaggattaagagattaaagtaagacaggtgaaagaaattatgagtattatttgggatctgataaatgtccatgaaatcttcacaattgatgttcagagattgaagtaaagacaggcataagaaattataagagtgtttttagggaagcgataaatgtccatattacaatgaaatcttcacaatttatgttcctctgccacagctccagccggtccctccatttggggtccttgacttcccacaacaaattgtctcattattaagatggcttctaaagtgattcatttttgtgacacataataagtgttagctgaggtctagctgtatggtgaaaagggctgatgaaaaatgtctacagagaggatagtcaacttatattaactgtgagttatactaggagctatacttaattcatttagactttatttggtcagctttttttatatttcaaaaaaagaacatttttaaaaaattaagtctttttaaatatatattctgctcaaatcaccatttcctttttttctgatgaaaaggaatttttcatgatctttcagggattatattttctttcaccttctatctgcattctctttcttcagctaattgattaaaaaagagatgcaaagaagacacatttgcttctcatccacacatcacttccacttgctattagtcattgtgagtagagctgagaaaagcagttttctagcatgacagcaacttctcagaaataaacaacactcggaaacaaaactataaatcttttcaaaagctaatgtattttaagcaaaataagcagatgcatcaataataaaatgcttgtggtagaatcgatttgttgatttcaattgagttcagataagatttgaccaaaatctagcaaacatagagcagaaaaaggaatattatctgaaataaggatattgtaaataaagttaatttgtcaatagaaacaataatattatgacctcatgataatagtctcatctacggttataaaacatcaaatgctactttttattataaactgtatttcacataagtattctatttatatcatcctctttcactatttgaatgccttccccactttatatcagtggaaagcaggccagctgcttccaggaaagcaggcaatgctcttcttactttaacaatgatgatgaagagcacttgttttggtgatactcctgtgccaaaaactgttattttgcctgaagtactggttttctatttttctctatattagtaaaataaaattcttaaccaagaggaatttatctcatccaagctttatggaattttgtttacatttaggtgtctctgactttcctggaatattgaaatttttatgaatctaaattgagtactataaataaacaatcttttactaaaagactttttgaagttggagtgatatttataaaaacttttcataacattgaagaaatgttttaaccatgttcccagtaattactctgaacatagaattttccatttttagtattcgctctgagtcacacaggggaaattgatatctttacgaatgggcaaaaaaaggtgctgagtggaggtgcaacacattgcacatcaatgcttttcacatgcacctattagggtcttaatttaattgaactgtcatttgcatagctagacacttattgaatctagtcatactattttttagcaactaatgccatgtttgttaccctttagttttatacacttatttgcttggctgaaaaaaataagtcttctcttaatttactctaaattgagagactagatttacagtctggggctataatagtagttgaatgtttttaatagtattattggcaaatgttcaattcacattcagaatggatataaactttatgaaaagatagggagctgacaaagagtaaaaaatttcaaataggttaagtaagttttgagacctattgcacagcagggtaactatagtaaactataaagtattgcatatttcaaaataactaagagtaaatttcaaatgtaccaccacaaaaatgataggtgagttcatagatatgttactaaacaaaacttaattattccatattttatacatatactaaaacatcacactgtatgccataaatatgtgcaactgtgatttaccaatcaaaaatactactaatactttttttataagagagagtgaagtaagatttaagatattgcaccagagaaaaatgtggttgttcatcttaaaattttaggaaacatacacatatatacattttatttcaaatggcttgctcatttatagatgtaggtaagtaaactttaaatatcatgaacagtcagaacccagcactcagaaatagacttgatttttaatgttcaaaataatataatactttgaaagacagactctaaagcaactgtttagagtaaaattctctctaaatttttaaataaatgatttccttcacttgttagaaaaaaattttaatatatatttttaaactatactgaaatttatcaaattaacataaaagtattaaacaagtaaacaaaaaacaatatgccttcttctctctaatgaaaaaactgacagacactccgcatttaaccaaatactttggtaaatggattctaacaatgatatctctcatgacttaaaacagccactagttttaacttagaattatattaaatttttatattaaaatctaggattagcttattattacatagaaaatttgtggtctgcatgtacatcatcatccattgagtggtctatagtttctgagtttcagaaatgctaatataagaatacttcttccaattgaataatttaagttttctcagtgactaaaaaagattggaattactgatcactcacttacaatggggttttaaatgttatttaatgaagatatataaagtttcttttaaaaatcattctaacaacatttcttttgctttttcacttttgttagaaaataagtacgaaaatttatgttactacaagcctataaattttatttaaatctagacataatgctaatcttaaaagatctgtatgtttaagattatggatactctatttacacttagaagataaataactgctttccagtaaatcaaatgaggcaattttgactgtcaattataagctattaaaatattaatactatcatctggtagaaattttaggtgtctgtatgttcaggttttttagcatataataaatcagaaactataaatttttagaaactataaataatacactaaaataaagtatcactttcgttttgtcagttttgaaatactgtcatttctagatgaaataacaattacagaggctgtggctgttgaaattagaaatgtcatggttcattcttctttacttgctgccttttcatttcacacaaacacagcagcacaaggaaggcaagaaatgccacaccttgattgaaaacatgccagtgcccatctagggagaataaatgtctgagcatattcacttgaaattcatggcatcttttgttcaactacagactttcatatggaaattaataaagaaaagaatttcacactgcaatagcgtaagaaaagtactctaaaaataccttctgacccattatttctatttttcacaagaatgattgtgatggaatgagcatttgcagcactgtggtcttaaataacccccactttctgttgaattatttttggaatacaaccataagacttttgtgcttttttttttagaaaaaatgttttatatttctaattcagtaatttagcataatttttagtctcacccattcacaaatagttcattctgaaaaaaaaaatgattaatccaattacattttcccccaaaagagtacagtaacaaattaagtctatagtgtagtgtacagttaatacataaataataaaggtgtaatttgttttacttgcacacttgaaaataaaacactttttgggctatagactaagaaatttcaggttagcttataaaatgtgaggagacctggtatagaaacattcaccaccatgccttaaggggtgaaaaatttgtctttcacccctaatttcaactattaacccagcactggaaaaatagaacatgtcattataccaaaaaacattttattatttttattttatatttaaggtacatgtgcagatttgtaaaacaggtagactacatgatgttgaggtttggatacttaataattccattgcccaagtagtgtacatcatacctaagcagattttctatgcttgtctcccatccttcctccttctttttagaattctcagtgtttattgttttcatctttgtttccatgtgcgcccaatttttagcatccatgtatgagtgagaacatgtggcatttgtttttctgatgcaataatttgcttagaatggcctgaagcagagctgcattcatgttgctgcaaaagacgttacttcattctcttctgttgctgcatagtattggaggttgtataagtacatcatttttcttatccaataaaagattcatgggtaactggttaaattctgtttttgctattgtgaatagtgctgcaatgaacatgtgagtgctggtgtctctttggcaaaattatttattctttttgggggcagatatccagtaatcggcttgattggtcaaatggcaattctatttctagttctttgagaagtccccaaactgctttgcacaggttctgaattaatttgcattcccaccaacagtgtagaaagatttccttatctctacaacttcaacatcttatttatcttacttttaataagtcattcttactggtatgaaatagtatcacactgtcactttgatttacatctttctgataattaggaacgttgagcaatttttacatgtttattggcagctcttatgtcttcctttgagaagaagctggctattcatatcatgtttgcttttttattaaatgtattatagattctgtacattaatccttcattgtctgcagtttgcaaatattttatttcatactgtaggtcatctgtttactttgctgatagtttcttttactgtgcagaagctctttggcttagatgccattttttatttttatttttgttgcactcatgttagatgttagtcataaattctttacagaggccagtattatctaagtgttattctaagatttttgtagcttggagactcacagatcaagtctttaatctatattgagttgttttttttttatagaaaaaggtagtacagttttcttccacatatgactaaccagttttcccagtattacttactaaatagggagttaattccccttttgtttatttctgttggctttgtaaaaataacctgattgcaaagtatagcttaattcagtactctctcttccatttcattggtctagatgtttatttttgtaccagaaccatgttatactggttattctgatgcaatcttggctcactgcaacctccacctcccaggctcaaatggttctctttcctcagcctcccaagtagctgggattacaggcatgcaccaccacacctggctaattttttacatttagtagagatgcaggtttcaccatgttggccaggctggtctcaaacttctgacctcaggtgatccatccatctcagcctcccaaagggctgagatgacaggcatgagccaccatgcttggcccagatttattcttttagtctgaagttttcttggctatttgagctctttaattcttttgaatgtattttagaatagttttctttttctaattcaataaaaatcgtcatggatagtctgataaaaatagcacttaatctgtaggttgctttaggcagaatgaccattttaattatattatttgaatccatgagcaatatttttccatttatttgcattgtctctcgtttctttcagcaatgttttgttgttctttgtagagatattttacccccttgatttaatgtatttctaggtatttttttgtgtgtttgttgctattgtaaatagagctgtgttttttattttgttctcagtttgaatattattggtgtacagaaatgctatgcatttgtgctgattttgtattctaagattttttttgaagtctttttccaggcttagaactcttttggtgaaacctttaaagtattctaggtggacaattctttcatcagtaaagataatttgactttctttgttttctgtttggattccttttattctctggctaggatttcataacttcaataggactgtttagaatggatattcttatttttattctcatggagaatgcttccagtttttgctcttttagtatgatgttggctaaggatttgtcatagatgactcttattaagatattttcatcaatgtccagtgtgttgacaacatttttgagttaatattgggttttcttgaatgctttttctgcccctactgttatttttttttcttttaattatctttacatggtgaatcacacttattgacttccatatcatgaaacaccttcatatatatggaaaagctcacattaatgtagcaaaataactttctgatttgcttttgaattcagtttgctagtatttcatggaggattattattccaatattcacccagaatattgacctgtactttcctttttttgtggtgccttcactagattttagtttcatatatttcactgatttaatataacaagttagggtgaaatcccaccttgattttttcgaatgcattcagtaggcttaggtaaaactctttgcaatgtggtaaaacttcgctgtgatttcatatgatccagggctttttatggttagtaggtttattattacttatacaatgtcattatacattttatacatttttgctctgctaaagacttctgttattaggccaggcactgtggctcatgcctgcaatcccaggactttgggtggccaaggtgggcatatcatgaggtcaggagatagagaccgtcctggctaatatggtgaaaccccatctgtactaaaaatacaaaaaattagctgggagtggcggcgggcgcctgtagtcccagctaattgggaggctgaggtgggagaatggcatgaacctggaagctagaccttggctaatttctttatttctttttagtaaacatgtttagtaaacatttctttttagttccactatgttggcaaggctggtcttgaactcctgacctcaggtgatctgcccaccttggcatcacaaagtattggccacagtaagccaatgtgtctggaaaaaaaaaaaatctgtgttttgaagaaaaaagtatactttaaatttaattataactcttcaaagatctacttcttttaaagttatatacaaataattcttctttttgccaactttagttttggattttttcctatactcagcagtctgatttagtgtaatatctgaagtttgagtgacaggtatttctactgtgaattagctgatatttacataaacttaattttggattaaatattttttatatttactgtatctgcaaaaacatattttagtataaacgcatttgtgttttataatctgtagtttttgaaaaaatgtttttccaaatttattaaatttgcagggttattcttcaatataaattccctgatgttgagcaaagttggaacaactacctcaggttttcctgtagtacaaaatgtgtacaataaaatctgtgatacaagtacatgtactacaaccctcttaatatttataatgtgtttcctcaaaataaatattcttctgtactttaacagcttttattttctgaaagatctagtgacagtgattgcacttttaatacttttatttagtatgaactctctgatgtttaataagctgtgagaagatattactggcattaacaaaaatttttttttccagacagtctctctctgttgcccaggctagtgtaaatgctttcctttgcaataaggcatgagcactggttaaatgtttgtcacattgtttattacagtagttttctccagtatgagttatcttacctacaatcaagtgtgacagccacttaaaggctttgtcatattcttcacttttctaggatttctcatctgtacgatttcttttatattcagaaaagtctgaggtgttgccaaaagcattgtcacatctttcaggtttgtagagtctctcttgtgtatgaattagcttatgtctcttaagaattgaggatctattagaggctttcccacattcttcacacatgcatggtttctctccagtatgagttgtcttatatgtagtaagccttaaggactggttaagggcattgcaacattccacacaattgtaggaattccctccagtatgaattacatgaatgtttagtaaggattgaggaatagctaaaaggcttgccacattcttcagatttgtagggtttccctcctgtacaaattcccttatgttcagtaagcgttgagaattaattaatagttttgccacatttttcatatttgtagggtttttcctccagtatgaattcttttatgagtagtaaggtgtgaggaccagttgaagtctttatcacattcttcacatttgtagggcttctcaccagtatgaattctcttatgttccataaggtttgaggactggttgaagcctttgccacattcttctcatttgtagagtttctctccagcatgaattttcttatgtgtaggagggttgggaactgtttaaaagctttgccaaattcttcacatttttagaatttctctccagcatgaattttcttatgtttactaaagactgagaaccagctgaaggctttgccactttcttcacatttgtagggtttctctccagtatgaattttctatgataactgagggttgaggaccacttataggctttgccacattctttgcatttgtatggtttctctccagtatgaattaccttatgtttagtaaggattgagaacatactaaagcctttaccacattcttcacatttgtagggtgtctctccagtatgaattctcttatgttccataaggtttgaggaccagttgaaagcctcaccacattcttcacatttgtagggtttctctccagtatgaattttcttatgataactaagggttgagggccacttataggctttgccacattcttcacatttctagagtttctctccagtatgaattttcttatgtttactgaagactgataaccagctgaaggctttgccacattcttcacatttgtagggtttctctccagtatgaattaccttatgtttagtgaggattgagaacgtactaaaggctttgccacattcttcacatttgtagggtttctctccagtatgaattttcttgtgatatctaagggttgagggccacttataggctttgccacattcttcacatttgtagagtttctctccagtatgaattaccttatgttttgcaaggattgagaacataacaaagcctttgccacattcttcacatttgtagggtttctctacagtatgaattttcttatgataactaagggttgaggaccacttataggctttgccacattcttcacatttgtagggtttctctccagtatgaattaccttatgtttagtaaggattgagaacgtactaaagcttttgccacattcttcacatttgtagggtttctctccagtatgaattctcttatgttccataaggtttgaggaccagttgaaagctttgccacattcttcacatttgtagggttcctctccagcatgagttgccttatgttcagtaagtcttgagggccagctgaaggctttgccacattcttcacatttgtagggtttttctccagcatgagttgccttatgttcagtaaggcttgagggccagctgaaggctttgtcacattcttcacatttgtagggtgtctctccagtgtgaattttcttatgttccataaggtttgatgaccagttgaaagctttgccacattcttcacatttgtagggtttctctccagtatgaattaccttatgtttagtaaggattgagaatgtactaaagcctttgccacattcttcatatttgtaaggtttctcttcagtatgaattttcttatgataactaagggttgaggatgacttataggctttgccacatgcttcacatttgtagaatttctctccagcatgagttttcttatgtttactaaagactgacaaccagctgaaggctttgccacattcttcacatttgtagggtttctctccagtatgaattacctcatgtttagtaaggatggagaacatactaaaacctttgccacattcttcacatttgtagggtttctctccagtatgaattttcttatgataactaagggttgagggccatttataggctttgccacattcttcacatttgtagggtttctctccagtatgaattaccttatgtttagtaaggattgagaacttactaaaggctttgccacattctttacatttgtagggcttttctccagcatgaattgccttatgtgtagtaagggttgagaccttactaaaggttttgccacattcttcacatttgtagggtttctcatcagtatgaattctcttatgtttaataaggattgcagatcggttaaaagctttgccacattcttcacatttgtagggtttctctacagtatgaattttcttatgataactaagggttgaggaccacttataggctttgccacattcttcacatttgtagggtttctctccagtatgaattaccttatgtttagtaaggactgagaatgtactaaagcttttgccacattcttcacatttgtagggtttctctccagtatgaattctcttatgttccataaggtttgaggaccagttgaaagctttgccacattcttcacatttgtagggtttctctccagtatgaattaccttatgtttagtaaggattgagaacttactaaaggctttgccacattctttacatttgtagggcttctctccagcatgaattgccttatgtgtagtaagggttgagaccttaataaaggttttgccacattctttacatttgtagggcttctctccagcatgaattgccttatgtgtagtaagggttgagaccttactaaaggttttgccacattcttcacatttgtagggtttctcaccagtatgaattctcttatgtttaataagaattgcagattggttaaaagctttgccacattcttcacatttgtagggtttctctacagtatgaattttcttatgataactaagggttgaggaccacttataggctttgccacattcttcacatttgtagggtttctctccagtatgaattaccttatgtttagtaaggattgagaatgtactgaagcttttgccacattcttcacatttgtagggtttctctccagtatgaattctcttatgttccataaggtttgaggaccagttgaaagctttgccacattcttcacatttgtagggtttctctccagcatgagttgccttatcacattcttcacatttgtagggtttctctccattatgaattaccttatgtttagtaaggattgagaacatactaaagcctttgccacattcttcacatttgtagggtgtctctccagtgtgaattttcttatgttccataaggtttgaggaccagttgaaagctttgccacattcttcacatttgtagggtttctctccagtatgaatgacctcatgtttagtaaggattgagaacatactaaaacctttgccacattcttcacatttgtagggtttctctccagtatgaattttcttatgataactaagggttgagggccacttataggctttgccgcattcttcacatttgtagggtttctctccagtatgaattaccttatgtttagtaaggattgagaacttactaaaggctttgccacattctttacatttgtagggcttctctccagcatgaattgccttatgtgtaataagggttgagaccttactgaaggctttgccacattctttacatttgtagggcttctctccagcatgaattgccttatgtgtagtaagagtcgagaccttactaaaggctttgccacattcttcacatttgttgggtttctctccagtatgaattatcttatgtttagtaaggattgcagattggttaaaagccttgccacattcttcacatttgtaggatttctctccagtatgaattaccttatgtttagtaaggattgagaacttactaaaggctttgccacattctttacatctgtagggtttctctccagtatgagcactcttataataagtaagggttgaggaccagttaaaagctttgccaccttcttcacatttgtaggaattctctctagtataaattcttttatgttgagataggtgtgaaagcatgcaaaatgatctgacgtattctttacattgcaaatgtttctttccagtatgccttatcttatgtctgtttgaatttgaacatttatgaaagacatttgcatatttgccacgttgaaatactttgctctgtgtagttgtcaaactctggttaagtttattataaccttctttgtgcaccttacactcatccacattggtataaccaatttttaagtgtaaattctcatgtccacatttttcataccttctcaatatcactttttggaaagaatcttctatgccctgctctggccaaagatcttgagcaaaatgagaacatataactgaaaagaaataaaaatcacaaattagcctacttattagactcagataaatacagtttctaaatctaaactataaaattattcaaactacataagcaagatgacactgcaatatgacacaggccctaattcttcatagacatataaatctaataaaaacatatagaccgaaatacatatgtggataatttatacatgagttaagtgtgtgcagtgcctgaattaagctgaatgcagagtcacacagaaaaaaagaaaagtttgttaaatttacccagtacgactctttctgttcctcaatattacctagtaccttcagaactaaattgtcaacttctgtttgtgtttttttgttttgttttgttttgttctgtttttaaggaaagtaaaatattggcacaaaaaatttaatttatgtcttctacagccctttccacacactggtttctgtctcccatgacataaaatgctgaaagatatggtggtatacttagaaatgacagtttgagtctgctgagaccaaaggtaaatgcactgcagcagagcactgcagtcctgcagagagagaccagatgtaccaagtgattacttttcagaagaaagataaataatctctctcaactaaaagtaaatgcaaaacttcagacaagaaatctgaagatgtttgagaggcccacataatcttaacccagaccattgttttctgactatgccaggacaaagctacattataaattttgtgacaggtagcctttttaaatgtccaaatctcaaagattaaaatctatacaatatagggcaatataattccatcaaaaatattatacaattttcagaaagaacccattagcaatggatatactaattttaaaaactgaataacactcaatgagtgaaataggaacacaaaagtgtatagaaaatcagaaaaatgaggataagaacaaaaatgaccagtgaaatgtcaacaaaagatttgcagtccagaagaaaactgtgtgatatagtcaaagtccaaaaaaaaaaaaaaaaaaaaaaaaaaaagctatcaagtgagaataataccatcagcaactctgtcctgcctaatgggggaaaaaaaacaactttcaaaataactaaattcttaagaagtatattagcactgcatatgtcttccataagaaagatgccgaaagcagtttttaccactgaaaataacataatgtaagaaaacaacacctaatcatataaaaatacattattttctaggaaagacatgcacagacaaaaaattgaatttctagcattattctaatggtgcagaaaacatttttaattattctctaacatttaagagataaaagcataggaattattataaacatctgttaatgaatatacgacataaatcaataaacttagcaacatcggtgacaaatttaagagcagacataatagggaagaattttttatgcaaccaaagttaatttttcacctgattaaaatatattgttgtatttttaggttctatgcaatccccaaggtaccacacacacaaaatatctgtatacatacagaaaagaaaactaagatagtgaaagcatatccatacaaaaatcagacagaaacaaaggaagacagaaagagaaaatgagagacaagatgcaagaatcaaatagaataggtaataaaagtaactccttcactttcagaaaattatttaaatatatggaaagttaactttcaaatcaacagatatctaatagatttattaacatttattcttttgagacaaagttttacttttgttgcccaggctggagtgcaaagaccctatctcagctcacttgaacctctgcctcccaggttcaagtgattctcctgcctcagactcccaagtagctgggattacaggcatgcaccaccacacccagctaatttctgcattggtagtagagacagagttttaccatgttggccaggctggtcttgagctcctgacctcaggtgatctacctgcctcagcctcacaaagtgctgggattacaggcatgagccaccgtgcccaggctattaaaaaattttaaatatcaagatccaacttgcctttctacaagagtcagttgaaacctaatgttaaaaagactcaaagtggcaagatggaagtagacatttcatgcaaatattaatcaaatgagagcagaagaggtcaaaataatattacacaagctaaatcttaagtcaaagactcatattttataaaatgcactttacagtgaaactccaaagagacaaagaaagatattaaaaataatggattaactcagaacctgtgaaaacgttgaatacgtgtgtgtgtgtatcacacattaggattacaaatacagaaagcaaatactgacagaatagaagaaacacaaggagagcaatacaattatagtaggatattattacaccacactttctgtaataaaaatcaaaatagaggaggctgccaagatggccaaataggaacagctctggtctacagctcccagcgcgatcgacacagaaggtgggtgatttctgcgtttccaactgaggtactggtttcatctcattccaactggttgaacagtgggtgcggctccctgagggcaagccaaagcagggtgggatgtcgtctcccctgggaagtgcaacgggttggggaactccctctcctagccaaggtaagggtttagggactgtaccatgaagaaccgtgctctccagcccagatactgtgcttttcccatggtcttcgcagcctgcagaccaggagattccctctggtgcctatgacaccagggccctgggtttcaagcacaaaactgggtggccatttgagcagacaccaaactagctgcaggaggctttttttcccccataccccagtagtgcccagaagtccagtaagacagaaccgttcactcccctggaaagagggctgaagccagggagcaaagtggtctggcttggcagttcccacaaccagggagcccagccggctaagatccactggcttgaaattctggctgcaagcacagcagtccaagctccacctgggaagctcgagcttggtgggggaagggcgtccgccattgctgaggcttgagtaggcagctttaccctcagagtataaacaaagccacccggaagattgaactggatggagcccatcgcagctcagcaagaccagactgtatctcaagatgcctcctctttgggcagggcatctctgaaaaaaatgcagcagccacattcaggggcatatagataaaacgcccatctccctgggacagagcaccttggggaagggacagctgtgagtgcagcttcagcagacttaaacatccctgctggacaactctgaagagagcagtggaggtaccagctcagcatttgagctctgctaagggtcagactgccacctcaagtgggtccctgacacccgtgtctcctgattaagagacacctcccagtagaagctgatagacacctcgtacaagagagctctggctggcacatggcaggtggccttgggacgaagcttccagaggaaggaacaggcagcaatctttgctgttctgcagcctccgctggtgatacccaggcaaacagggtctagagtagacttccagaaagctccagcagatctgcagcagagaggcctgactgttaaaaggaaaactaacaaacagaaaggaatagaagtaacatctccaaaaggatgtttactcagaaaccccgtccaaaagtcatcaacatcaaagaccaaaggtagataaatccataaagatggggagaagccagtgcaaaaaggctgaaaattccaaaacccagaatgcctgttctcctccaaaggatcacaactcattgccagcaaagaaagaaaactgaatggagaatgagtttgacgaattgacagctcaaatttgacaaatttcagaggtgggttataacaaactcctccaaactaaaggagcatgttctaacccaatgccaggaagctaagaaccttgaaaaaaggttagatgaattgctaacgagaataaccagtttagagaacataaatgcctgatggagatgaaaaacacaccacgagaacttcatgaagcatacacaaatgtcaacagctgaatcgataaagcggaagaaaggatatcagagactgaagattaacttaatgaaataaagcaagaagacaagattagacaaaaaagaataaaaagaaatgaacaaagcctccaagaaatatgggactatgtgaaaagaccaaatctacatttaattcgggtacgtgaaagtgacagggagaatggaaccaagtaggaaaacactcttcaggatatcatccaggagaatgtccccaacatagcaagacaggccaacattcaaattcagaaaatacagagaacaccacaaagatgctcctcgagaagagcaaccccaagacacagaatcgtcagattcaccaaggttgaaatgaagaaaaaatgttgacggcagccagggagaaaggtcgggttacccataaagggaagcccatcagactaacagtggatttctctgcagaaaccctacaggccagaagagactggggggccaatattcaacattcttaaagaaaggaattttcaaccaagaatttcacatccagccaaactaaacttcataaatgaaggagaaataaaatcctttacagataagcaaatgctgagagattttgtcaccaccaggcctgccttacaagagctcctgaaggaagcactaaacataaaaaggaacaactggtaaaccagccactgcaaaaacataccaaattgtaaagatcattgacactatgaagaaactgcatcaactaatgggcaaaataaccagctagcgtcataatgacaggatcaaattcacacacaacaatattaaccttaaatgtaaacaggctaaatgccccaattaaaagacacagactggcaaattgaacagtcaagatccatcaaagtgctgtattcaggaaatccatctcacgtgcaaagacacatataggctcaaaataaagttatggaggaatatttaccaagcaaatggaaagcaaaagaaagcaggggttgcaattctagtctctgataaaacagactttaaaccaacaaagatcaaaagagacaaagatggtcattacataatggtaaagggatcaatgcaacaagatgagctaactatcctaaatatatatgcacccaatacaggagcaccgagaatcataaagcaagttcttacagacctacaaagagacttagatacccatactatagtagtgggagactttaatatcccagtgtcaatattagccagatcaatgacacaaaaaactaagaaggatattcaggacttgaactcagctctggaccaagcaaaccaaatagacatctacaggactctgccacaaatcaacagaatatacattcttctcggcaccacatcactcttaaattgacaacatacttggaagtaaaatactcctcagcaaattttaaaaaatggaaatcataacaaacagtctctcagagcacagtgcaatcaaatttgaactcaggattaagaaactcactcaaaactgtacaactacatggaaactgaacaacctgctcctgaatgattatagggtaaataataaaatgaaggcagaaataaaaaagttctttgaaaccaacaggaacaaagacacaacacaccagaatctccgggacacagacaaagcagtgtctagaaaatatatagcactaaatgcccacaaaagaaagcaagacagatctaaaattgacaccctaacatcacaatgaaaagaactagagaagcaagaataaacaaattcaaaccctagcagaagacaagaaataactaagaaaagagcagaactgaaggagatagacacaaaaaatccttcaaaaaaatcaatgaatccaggagctggttttttgaaaagattaacaaaatagactgctagccagtctaataaagaagaaaggagagaagaatcaaatagacacaatcaaaaataataaaggggacatcaccactgattccacagaaatacaaactaccatcagacaatactataaacatctctatacaaataaactagaaaatctaaaagaaatgaataaattcctggacacatacaccatcccaagtctaaatcaggaagaagtcaaatccctgaagagatcaataacgaattctgaaactgaggcagtaattatgagcctaacaaccaaaaatgtccaggacccgatggattcacaacctttgtaccagaggtacaaagaagagctgattctattatttctgaaactattcccaacaatggaaaaagagggactcctgtctaactcattttatgaggccagcatcatcctgataccaaaacctggcagagacacaacaaaaaaagaaaatttcaggccaatatccctgattaacatggatgcaaaaatcctcaataaaatactggcaaactgaatccagcagcacatcaaaaagcttatccaccaagatcaagtcaggttcatctgtgggatgcaaggctggttcaacatacacaaatcaataaacataatcgctcacataaacacaaccaatgacaaaaaccacatgattatctcaatagatgcataaaaggccttcaacaaaattgaacagccttcatgctaaaaacttgcaataaactaggtatagatggaacgtatctcaaaataataagagctatgtatgacaaactgacagacaatatcatactgaatggtcaaaaactggaagcattccctttgaaaactggcacaaaacagggatgctctctctcaccactcctattcaacatagtattggaagttctggtgagggcaatcaggcaagaaaaagaaataaaggatattcaaataggaaaagaggaaatcaaattgtctctatttgcagatgacatgattgtatatttagaaaaccccactgtctcagcccaagatctccctaaatggataagcaacttcagcaaagtctcagaatacaaaatcaatgagcaaaaatcacaagcattcctaaacaccaataatagccaaatcatgagtgaactcccattcacaattgctacaaagagaataaaatacctaggaatacaacttacaagggatgggaaggacctcttcaaggagaactacaaaccactgctcaagaaaataagagaggacacaaaaaatggaaaaactttccatggctgggcgcagtggctaacgtctgtaatcccaccattttgggaggccgagacgggtggatcatgaggtcaggagatcgagatcatcctggctaacactgtgaaaccccatctctactaaaaacacaaaaaaattagccgggcatggtggcaggcgcctgtagtcccagctactcgggaggctgaggcaggagaatggcgtgaacctgggaggtggagcttgcagtgagctgagatcgcaccactgcacttcagcctgggtgatagagcgagactccatctcaaaaaaaaaaaaaaaaaaggaagaacattccatgctcgtgcatagaaagaatcaatatcatgaaaatggccatactgcccaaggtaatttatagattcaatgctatccccatcaagctaccattgactttcttcacagaattagaaaaaaaaccgctttaaatttcatacagaaccaaaaaaaagctcatatagccaagacaatcctaagcaaaaagaacaaagctggaggcatcatgctacctgacttcaaattaccctatgaggctacagtaaacaaaacagtatggtactggtatcaaagcagatatatagaccaatggaacagaacaaaggcctcagaaataacaccacacatctacaaccatctgatctttgacaaacctgacaaaagcaagcaatgggaaaaggattccctatttaataaatggtgttgaaaaaactggctagccatatgcagaaaactgaaactggaccccttccttaaaccttatacaaaaattaactcaagatggattgaagatttaaatgtaacactgcaaaccataaaaaccgtagaagaaaacctagacaatactattcaggacataggcatgggcaaagacttcatgactaaaacaccaaaaacaatggcaacaaaagccaaaattgacaaatgaaacctaattaaactaagagcttctgcacagcaaaagaaactatcatcagagtgaacaggcaacctacagaatgggagaaaaattttgcaatctatccatctgacaaagggctaatatccaggatctacaaagaacttaaacaaatttacaagaaaaaaaaaccatcaaaaagtaggcaaaggatatgaacagacatttctcaaaaagacatttatgtggcaaacaaacatatgaaaaaaagcacatcatcactggtcattagagaaatgcaaatcaaaaccaaaatgagataccatctcatgccagttagaacggcgatcattgagaagtcaggaaacaacagatgctggagatgtggagaagtagaaaagcttttacactgctggttggagtgtaaattagttcagccattgtggaagacaatgtggcgattcctcaaggatctagaactagaaataccatttgacccagcaatcccattactgggtatatactcagaagattataaatcattctactataaaggcacatgaatacacatgttttttgcagcactattcacaatagcaaagacttggaaccaacccaaatgcccatcagtaatatacaggataaagaaaatgtggcacatatataccatggaatactaggcagccataaaaaaaaatgagttcatgtcctttccagggacatggatgaagctggaaatcatcattctcagcaaactaacacaagaacagaaaacgaaacacagcatgttctcactcataagtgggagttaacaatgagaacacagggacacaggaaggggaacatcacacaccagggcctgtcaaggggtgggggctaggggagggataacattaggagaaatacctaatgtagataacgagttgatgggtgcagcaaacccccatggcacgtgtatacctatgaaacaaacctgcacgttctgcacatgtaccccagaatttaaatcataatttaaaaaaacagaatattaataaggaaacaggctacataaagatggtataaaacaactatttctgacagaggtatagagagcactccttaacatcaggatacacacccttctgaatagctcatacaatatatttcttgatagaccacctcttaagccaaaaaagaagtcttaccaagttttttaaaactgaaattttatgaattattttctgtgactaaacttgaatgccagtatacaacaaaaatagaaaaaaactgaaaacaaaacaaatatgccaggtgcggtggctcatgcctgtaatcccagcaccttggaaggccaaggctggtgaatcacaaggtcaggagatcaagaccattctggccaacatggtgaaaccctgtctctactaaaatacaaaaaactagtgaggcttggtggcacgcacctgtagtcccagctactcaggaggctgaggcaggggaatcgcttgaacccaagaggtggaggttgcaatgagccgagataatgccattgcactccagcctggtgatagagtaagactctgtctcaaaaaaacaaaaacaaacaaacaaacaaaaaaaatatatatgaatttaacaaaacactcgagcatgctcttatgcaaaggttgtaatgttaatattgtaaagatgttcatcctattcaatgtaatctataaatttaatgaaatgtttttcaaatttctccttgcatttttgaaaaaatagaaactgcaaccctaaaagtatatagaatctcaaaagacaataaagtacccaacaatcttaaaataataataataaagcaatgttgcaggcattaaagttcctgatttcaaaagacattccaagccacagaattaaaacaatctggtataaggatgaaaaatcagactaaagaaatagaatgcgacacatatactttaacatgtatagtcatatgaggagtcatttacatagcaataattattactgtaagctagtaggtaaaggcaatgcaaatttctgtcaccaaatcattcagtaaatataatctgaaatataaatatactggaatatcactcagttttaaaaaagcagaaaatattctaccaattataacgataaatcttgataacattatgcaaaatgaaatgagtcagccacaaaaagacaaagattgtatgagatagagagatataaagcatttaaactcttagaaacagataaaaacaaaaaggtctcctatttgcttaacccccaacagcaagaaagtttgtcagtcatccgtgacaaaaatatcttaatgagggaaccaggcatcatggttaacatctgtaatgacagcaacatggtacagtaaggttggagaattgcttcaggacaaaattttaagaccaacctgggttatgtagtgaaaccccatctcaaaaataagtgcctttaagagagctttgagatccagggaggcaattgtgaaactttgctaaagcccaagattgaggagcacccttttcagcaggcaagctttcattcaagtggcaaactacaggacccctgctcttgactacagaccagaaaatgtcccacccaacttggtcccacggagaattttgaacttactctgtaaccatcccaaactcctcccagccacagtctgtgagaggtctttgtcttccagaagcctggagagagatacccatttagagccatgacggcaggccggcagaccttggtccttactgtggttccaataccagtttcatgactcagttccagtttcctaagccacggttcatggccacttctgcccatgtagaaacctacagtgacctcagaaatgctctctggtactcagtgaaaccatactaatccacatcctattataaagcccaccatacgcagacctgactgcagaaacctgccctagcatctgataccctactgagcaaagtcctgagggatatttactctgtccaaaaataaaatgggaattacaactaccaaagccccttatagtaagccaactctattgcagagccagcagccctgtgaccgagctacaaccctctgaaaccagtttataaaaactttaagaggtgtttactccttcaaattcatacaccaatgcaaaagtatattgtgttcattgtcaatgcttctattttaacacagcacttgaagtatgtggaagaaaaattagtcaaaaaaattttaatgtcattgaaattgaagacaaataagtaaaacattgctgtttgtaaatcatgcaatgttctctataaaaaaccataaacagtacattaaaaccttttcaaaccaataaatacactcagtaaattagcaaaatataaaattaacatacaagttatgtttccatacacttaaactatctgataaaatagagtaataaaacaatcttatttacaatagcactaaaataataaatatctgagaacaaatttaactgaggagttgaaaaagttttcaagtgcaagatttatcaatgaaaaataatgagaacacaaataaattcaaatacattttatgcctatcaattcaaagaataaatggtaaaatgccatattatccaaagtgatctctagattcaataaactctctatcaatattccagtgtttttttcacagtaatgaaaaatacaatcataaaatttacatgaaactacaagaaactgtgaatagccaaagcaatcttgaagaaaaagaaaaaagcagaaggacatcatactttataatttcaaactatatttcaagactacagtaataaaaacaggatgaaatgtacagaaaaatgaacaaaaaaaccccaaagatacagaaactactactctcacacatttcagagatgatggaaagagagaacttataagatagtttaacatggagtatcttaaaatcatgcagatatctgtgtgtccacaaaaacaaacaaacaaaaagattgtgcactctcttgtatgccatgaacagtactttggctgtcactgtaaacttgaaggaagattactgaagggaaagaagaattcttagaaattttaaaagtgtaagaccgaagatgcccctgtgtgagagaaaattaaagaataaaaataaaaattagtctctccagaaactacttcttttggaacacagcttccagaatcactttaaggactggcttcctccttgactttcgacctctcatccatgttgtctgtattcactctcacctacctggggattcttccaccatctcatgtctcttcatattccaggactcttttccttcctccagaaaaatgatcaggtctggcttaaaggcagcaatacctgttttattaaaaatgaacaacatgcttcttgctcatattctccaattaccaactcagtaatgtgctcagtaaagaggatgtaatagaatattctaatagatttatcccaaaatactaaattataataagttgggaaaaaggcttatggggtgcctgtataagctggccataaaaatatgggacaatatgttgtggaaagccacaggaggcctccgaggaggaaagcctccttactgccatcacgttcccatgaccagagcgtgacctgctctcttacttataaacactgtgctcaaggagaaagatactcctttgaagcactggaatgtggccagatatgcaggctcctagttaggcccaccccccaacagctgctctccggtaagttaaagaatgaatcagtagttaagtttattctgcttcagcacaaagaaactttgcctaaaccaccactgctatagattaggtgtatgacacactacctccctttcaccatttcacccctgaacatctgcttcttagatctaagtgattatactcaataaatactgtggagaccagaacttgatgccttttgcagcctccaaaagtgcaactggtcccctggcaccccaccctttgtgcactcttaacctgtctcttctcattccttcgtcgccaccggactttctgtaccctacaggtggtattgaagctggtccccaacaataacagaaatttctaaatatttagaaaattctctaattttgtaggttcttaattttatcacctagtaatactgaattaaaaattggtggttgccagtaaacttttgaaattaccattaatctaaagtgaaggacacagatcagctcaagaatgtggtaagttcaggtcaagatgaaacatcttgaattttttttctatatggaaaaactcctatgattttcttgaaaatagaaatctgaaagcataaattaccaaaaagaaattatacaaaaaagaaatggtgttgggagctgaaagcctgagggtcatgaccaactcagcattccactggaggctatatgataaacagcaaacagtttatcatgaatgcagaatgtgggcaaacttgcttctgctcctgccaccagaaggtacactgaggacagtcactccctggtgccatgctccttgaagttatctactggaacatctggagagtgctgttgaaagaatacagtcatgcaggccttcattaagtcaagcagctgaccacaacctcccccttctccctatctcctttactcaataaatacaaagggctatagaagctcaggacccttgttgactagaagcaaggaggcccctgaccccttcttccaaatatactcttttgtctttgtctttattctcacattcatcctccgttgttcagtccaataaggtctgcagcaaaatgaaacctgtagtgtatactaggaattgcgtattaaagttattctcacccaggaagaccaggtttctgtagttctctaacatcacatttctatataaattctgctgtgcagtgtccaggcattgccactcctccagagagaattctatggccacatccctaaatgtcaatgatccctggaaaacacaaacacacatatttatcaactggacatgggcagaatttttaatttgactcaaggtaaaatgcagagagtaaagagagctggttctgacttataagcatgactgaaattattcaataaaataatttttaacacaaatattctctaacatattctctctcttttttctttttttaattattattatacttcaagttttatggtacatgtgcagaatgcgcaggttaattacatatgtatacatgtgccatcctggtgtactgcacccattaactcgtcatttagcattaggtatatctcctaatgctatccctccccccaccccccaccccacaacagtccccagactgtgatgttccccttccggtgtccatgtgttctcattgttcaattcccatctatgagcaagaacatgcggtgtttggttttttgtccttgtgatagtttactgagaatgttccaatttcatccatgtcccaacaaaggacatgaactcatcattttttatggctgcatagtattccatggtatatatgtgccacattttcttaatccagtctgtcattgttggtcatttgggttggttccaagtctttgctattgtgaatagtgccgcaataaacatacgtgtgcatgtgtctttatagcagcatgatttatagtcctttggatatatacccagtaatgagatggctgggtcaaatgttatttctagttctagatccctgaggaattgccacatggacttccacaatggctgaactagtttacagtcccaccaacagtgtaaaagtgttcctatttctccacatcctctccagcacctgttgtttcctgcctttttaatgattgtcattctaactggtgtgagatggtatctcattgtggttttgatttgcattactctgatggccagtgatgatgagcattttttcatgtgttttttggctgcataaatatcttctttggagaagtgtctgttcatatcctttgcccactttttgatggggttgtttgtttttttcttgtaaattagtttgagttcactgtagattctggatattagccctttgtcagatgagtagtttgcgaaaattttctcctgttttgtaggttgcctgttcactctgatggtagtttcttttgctgtgcagaagctctttagttcaattagatcccatttgtcaattttggcttttgttgccattgctattggtgttttagacatgaagtccttgcccatgcctatgtcctgaatggtaatgcccaggttttcttctagggtttttatggttttaggtctaaagtttaagtctttaatccatcttgaattaatttttgtataagatgtgaggaagggatccagtttcagctttctacatatggctagccagttttcccagcaccatttattaaataaggaatcctttccccattacttctttttctcaggtttgtcaaagatcagatagttgtagatatccagcattatttctgagggctctgttctattccattgatctatatctctgatatctctgttttggtaccagtaccatgatgttttggttactgtagccttgtagtatagtttgaagtcaggtagcgtgatgcctccagctttgttcttttggcttaggattgacttggtgatgcaggctcttttttggttccatatgaattttaaagtagttttttccaattctgtgaagaaagtcattggtagcttgatggagatggcattgaatctataaattaccttgaatctataaaatacctagtatggccattttcacgatattgattcttcctacccatgagcatggaatgttcttccatttgtttgtatcctcttttatttcattgagcagtggtttgtagttctccttgaagaggtccttcacgtcccttctaagttggattcctaagtattttattctctttgaagcaattgtgaatgggagttcactatgatttggctctctgtttgtctgttattggtgtataagaatgcttgtgatttttgtacattgattttgtatcctgagactttgtcgaagttgcttatcagcttaaggagattttgggctgagacaatggagttttctagatatacaatcatgtcatctgcaaacagggacaatttgacttcctcttttcctaattgaataccctttatttccttctcctgcctaattgccctggtcagaacttccaacactatgttgaataggagtggtgagagagggcatccctgtcttgtgccagttttcaaagggaatgcttccagtttttgccgattcagtatgatattggctgtgagtttgtcatagatagctcttattattttgagatgcatcccatcaatacctaatttattgagagttttattctctaactctgataaaagaaagtggtataagatccataacatcagtttatatgtaatatttttctagataataaagtataaactgagggcataaacactaacatgtacaattttgagtgctatatttacatcatacagaattaattgtgtgccaggcatggtggcttatgcctgtaatcctagcactttgggaggctgaggcaggcagatcacctgaggtcgggagttcgagaccagcctgacaaacatggagaaaccctgtctccactaaaaacacaaaattagccaggcatggtggcgcatgcctgtaatcctagctactcaggaggctgaggcaggagaatcgcttgaacccgcgaggcagaggttgcggttagccgagatcatgccattgcactccagcttgggcaacaagagtgaaactccatctcaaaaaaaaaaaaaaaaaaagaatcaattgcatttttcaaatggaaagacatagttttgtgtattattcagatggaatagatgtgttgagttagaaggtatcactcaaattttaatgtgtacaacaagctagagatcctgttaatgcagattttttttttccagaagatctgagataaagtctgagttactgaatttctaataagctcataagtatgccaaagtttttggcccaaaaagactattttgtcaaatatccagtaattgaatgagcctgtgtttttctcagtttttctggtttgtaaacaaagatgagaggtttcattttccaaaaacagacaaatggaaaggaaacctaagaaagaagggcagcagccagattaaatgtgttggtttattcacatcagctgcataaagatacttgatgatgaagagaaaaataattaattctatagtgaaaaaatgtgtcagaaagcttatcaaccaagtgatttattaacatcaactacactagaacacatttttataatgtcctgatgcacccagaaggacgcagcattactgctgagatattgccccctgaaaggtaaattatagtctgagtttaaccataaggaaacattagttttatggaaagttcaagatacagatatctcccatgttctgtaatttttagtagtgattttaaatagtctttctttagcactgtagaaagcgggtatctcctaacaatttttaaagaattttctgggtaataaataccatactgcttcaatgagtgttttcttatcctgtactgcagagacataataaagaacacagatgaaaccacaacattatatgttctgtcttcactaaaaaccccaggttttccccaataggaattttgagtgtctacatcttcccatgttccacagccacaaagggacatttttaatattgcagattataaattcatagtgagatttctgcatggcatagaagaagccgtaatatagagaaggctctggtatacagaaaaaatatatatttttcagagactttgattattgtcagaattttttcaaatagttaagacaaactcattagggaggaaaaacacaaatacagaagtacaggtttgcaagtactaaacacatgttttctggaggaagcagactggacacagatcttgatctgagacatgtttagctgaaaaagaaaaggccatttttttctccttctcctccttctctaggattctttctcaaataaaattttctagacaaattacacctgcatcttgagaatatgcctttaaaagtgtcagcaccacaggtctacctgctgtcaccacatccacaggcagaaggaccaagacagaaaaactccatccatttctgtcctttatagccgaagagattaacaaagagtagctccacagagataaaaatatgcttttctttattttgtcctcaggagccatcccctgacacaggcaccagcaatttctgccacagtaatggaaatatgggccacgctgtactgtccctaccaaatccaaacagaattaggttcttggaccaccctttaatgcaaagatggaacttaactctcatgaatgtattttgaattcctcatacttgattctggcctcaccttagagtcacatgagccacttaattaaaacaacatggatgcttccaccaagaacaataaacagaatccatggacagggcacaagtaaaaagagttctgcaaaatggccaagtgatactaattagaagcctgggctgataactccttaagtaagcatttcctctcaagctctaatgagcttataaaatcacttggtaattttggccccactctatgaaatgtaattctgcaggtatggaaagggtccataaatgggtcttttaaacaaatgccctgtcaataatgatgttgctcccactgggcttattattagcattagtcagagaaatgaggcacaatgcagagtcccttacacgcagcactcttgtcaaaacacaaatacttctggtacaaatgaagacaatcattcttcatcctaaagtattatattctttgctgactctttaaagtttgcagaggaaaaaaaaaagcagcaatttctgagtaagtctgcatttggaaaacaacatgtgcacatgtactactacaatgtttattaagcaggtactatgtgctcaataggaagttacagagcactgtgatagcacattatgtgatttaatcctaataacaccctttcagttgatactaagtgttcaataattccaaggctttaaaggacccagcatttttatttctatttctgtttaactgtcattgattttttcaaaaaatgtatagaacaaaagctaaatatagacagatgaaagggatacagatggaaagagtttaatgcaatttagatacatttttattgtgtttatatttactttcttgtgacttgtgaatcaactactagatctggaggaacagaaaacaagctgctaaataaagtctcttcaagcactggttttaataaaaaatttgaaaagtaagatcctataatacatactttatatttcccatttatctgcttttaagtttcagaaaatgttgaacaccagctctaaaaaggcaacaggattcatgacccaaaactctgatctcttctaatcggttctttcaggcaagactccagggtagggccagacataaataaggcctccaaaaaagggtgaatatgaacagggctggggcagagtgtagagccgatgtacaattctgttctctatgccactggggggtactgtcagttcttttttttaagcttacttaagtaaacttaaatccgagtttgtataattttaatcttttttagccactgccctgtaaattttatattacatactaataagcaattcaaaaaaaaatcccttaaggttttctagaataatttttttagaagaaaaataagtattcttagcagggtaaaagaaatacaaataataataatgactcttccgtttataagttcaggtgtagacatcagaaaccacaatataaagaaagtggctcaaataaagcccaagttgttttttgtacatatctatttattgtacccaccatatgatccataattcaaccatttttccagttgctagtctagactacaacttccaggatggtagcaatcatgactgcttatctgtttttcttttctttttttttttttttgagactgagtctcactttgttgcccgggctgtggtgcgatggtgtgatctcagctcactgcagcctcctcctcccaggttcaagagattctcctgcctcagcctcccaagtagccaggactacaggcatgagccaccacacccagctaatttgggtatttttagtagagatgggatttcaccatgttggccaggctggtctcgaactcctgacctcaggtgatccacccatcttggcttcccaaagtgctgggattacaggtatgagacattgcacccagcctgtttcttctatttttttatgactatatgaaatggaagcaattagtttatctgtttgagcctccagacctcctgattttttacccaagtaccagggaactggaaaaactctcatctggctaccaaccagagatacttcttgtataacgggtgaaacaaacacgagatgactcatttctctcacactgggacagaagcagaattaatcactcttgtcagcctgacacaattctgttctggacattctccaatgtctcagagattcataggtaattgttagacggttccctgtgaacctgggctgatggtccaatgataagacaggcagagaagactcaggatgattctaaataaaaaaatggaactactttggctcaactccagaatccgggttgtccgtcctgatttgctagctgttgggtaagtagaaggacaagaagactctactccagtatcacattttacaggtaggtatagttgtggtcatggctctggatactttgtggtcttaagatgcttgtttacacttacagattctgccatcagattctatttactcctggagcctctcatataactgtggcaggttaatgaagaagatgtgaaaaggtcaaaaagccacactcccaaaaaaggaatttaaaatgtctatgttgatatctcacaatgcagaaaatgcctcctgttggttttctgtaaattctcaatccaaagtctggccctgccttgtaaatcccagcagaggccaggtcttatttgcaaattctaggtgaaatcaacctcactctgcatttttgggtgttacagcaagtagagtgaaatcaaaggagagattccctcctagaggctgctctaggatattctaaataatattttaccttaaaaaagctgacacaacatgaacataagcagacagtttatttgggtcaagcttaagtattttaacttgagacaaaatattcaagttgcctggaatctacactttcattagcagcacttacaagtggatttgtgaaggcaaaaaagaggaacagtgagtgagctgatacaaaattggttgtgagaaattcttatttatgtaaagaaataactttaataattgattggatatacatcattaaggttaaggatatggaatatagtgtccagtgtagaattattagtttaatttatagctacttgtggcaatagtgaacagtttcaatagataaatatatagctgaaaaaaaggagaaaaacgtaattgtgctctcattttaatgtttctctgactttagtaactaaaaggacttgcattcctcagataaaaacttatttttttcttttcaattctcaagacttagatttagaatacggagctgcaaattcaggtcctgcatgggtaaagtagcaataggtgttacctgaacatttgtgggcattttagcatgaggagggagggagaagtggattctcacgtctacaggtctactcagtgcacatattttactctgattgggtttctgtgccccatggtcactgaatcagtttcaggtctgaagacacaagtcattgaaagaggtaaaatggttaatatctgacctatgaagtttgtagaaatctgttctagcctctctaaaagtgactgcagaggatgatagataccaagtacgtagagacacaattccacctgcatatttagggtacagcatgcacttcacagcacaactgtgaattgactggaagcctgagtggaaaaggcccatctagagtaaagcttagttggcaccttatgtgtttgtattatgtctggtaattctagacaaggtttgggaaatataattagaagcacaattttcttcagccccagaggaactccacataacagaacagaaagaaaattgttttattacacaattacatgtgaatatgacatgcattatagtcaatttgctcaagagattgcaaagacagaaagacagtgaccataatttgtctacaagtagaatttacagcaccatgtcatacatagttcatcctaaattcacatggtagttgggaaggccatccatgtatgctaattggttataatcaatgacaaaataaacttttcacatcttcatgactggaggtagttttgcaacttgaaccccggtgcctactgaaggtaggctttgactcttctacaaaaagtgttgattcgggtgctatctttttggctatttacattttaaagcaatagctctctactccctgagcactgggctagagcactcctgctttccctctcttggtggctagtgtactctcttgaccccaccatctgccactgaggcacagcccacagcacagggctcacagctggaaactcacatcttaggtgaaccccatttgccacagcagcactccagtggcacatcagacagtgaagcctgagcagcaggaggagagcctgcaggcctcctgggtagaattgcaccttcacaataatagaaaagggagcactgtttcagcctcagtttttatttataatggtgacatgaaaaaaatactgctgggttttagcatgagtccagatagagacagctctgagagttctcactgtgacagctcacgtctttcacagacaccacgggatactaatagggcttctcaaacagacacacaatgcattagagagaaaaaactgctctcattctgagaaagattatgttgagagaaaaaagttaaaagtgtcttaagaaaaaactgagattagatataagattgatcaagtcagccagaaaatatttccctaagaagaatttctctccaaacacccaaagtgcatagctactctcagcaagggaaacatgagcattattgaataaagggggcacattctcagcaaaaaaaaaaattttttttttttgagatagagttccattcttttttttttttttttggacagagtctcactctgtcgcccaggctggagtgcagtggcgcgatctcggctcactgtaagctctgccttctgggttcacgccattctcctgcctcagcctcctgagtagctgggactatcggcgtgtgccaccacacccggctaatttttttttgtatttttagtagagatggagtttcaccatgttagccaagatggtctcgatctcctgacctcgtgatccacctgcctcggcctcccaagtgctgggattacaggcgtgagctgccacgcccggccaaggagtttcattcttgttgccctggctggagtgcaatggtgtgatctaggctcactacaacctctgcctcccgggttcaagcaattctcctgtctcagcctcccaaatgactgggactgtagacacacaccaccacacctggctaattctgttatttttggtagagacgaggtttcaccacattgtccaggctggtctcaaactcctgacctcaggtgatccaccccccttggcctcccaaaatgctgggattacaggcatgagccacagcgcccagctctcagcagaattttaaaagatttatcttccatctctgctgttctcttatttcctaaccattgaatgtgagatatattggaatatatctgacaacttccaccagcacttttttataaaaattgaaatctgactgtgttaatatagtagaatatattagagcttgcaacatagctaactggagagcaattacggtttttgggtagccatatcacttgtctttgtcctgtaatagtagcaagctaatttggtaaaatatatgacactaaaattatgctataattttatagcataattttatgctataattttatagcataattttatgctataatttataaattatatacctataatttattcccattggataaattaatatgcatgtcagactaatatctactataatgatttaatggtaaatttttttggatatcagatacaaatatgtaagtatgaataattttatgtactactcataatgtatgtaagattttaaaaaattatctgaactatacttcagttgaaacactatatttcaaaaatatgaataatattaaaataactaaggaattcaatctaagtaaatacgtggccttaaattcatactattgtagaaaatactgtttatatgaatgcaggttgtctacaaacactacacataactatactaactgtactgaagtaacccaagtacaacagactccactgttcagtctatacactgaactcttctggcttttgcagtgtaagtatgtcagccagcaaataatcaccctggataatcaggtttctgccaaagaacttactcaggatcttttagtctttattattctgtattgctaaatttaatccaatctttgtgctcaacttctttatgctcttgaaatgaactttactctgaacaaatttgtgtctactttaaagactaaagacaaaaaaaaaaccaatattttgccaagacaaaaagaaagcaatgaatctcaggtcccagataaagacaattctgagtcaaaaagaatgacaaatggtttgtgttattgctaatatgatttacatatatttcaaaaagcagaaaaaatatatacatataatctaaaccttttataaaaatcagcaagttatcctcccttattttcacatatgagaataaagcttcttatttctaatttatattttgtcttacaacagccaggtctctggacaagttcttgaactcttggacatctgaattttgcacactgtgtgcacttgaaagaatgtttatggggggaaaagcagaagagaggaaggtgttataaaaaaactccatgggttcacatgaataaagcaagttcttagagacctatgaagagactcagaatctgacacagtaataatcggagactacatctgacaagcactaatggacagatcattgaagaagaaaattaacaacaatattacgacttgaactcaacacttgaccaaacagtcctaatagacatctacagaactcttcatcgaaaaataccgtaatatatgttcttctcatcaccatgtggcacatactctaaaattgaccacacaatcagaaacaaaacaattctcagcaaattcaaaaatccgaaaattatacaaaccacacacacagattacagcttaagaaaaaaatgattcaataccaataaaacaactggaaactatacaattaaataaaaattaaatggcctacacttgaataactttttggtaaataatgaaattaaggcagaaaccaagaagtgttttgaaacaaataagaacaaaaatacaacacaccagaatccctgcaatacatctaaagcaatgttaaaagaaaaatttatagcattaaatccccagatcaaaaagttaaaaagatctcagtttaacaacctgacatcataaataaaagactgagagcaacaaaagcaaatcagcccctaagctagcaaaagacaagaaataaccaaaatcagatctgaactgaaggagatttagacatgaaaaattacaaaatatcaagagatccaggtataaaatctatttttttaaaaaaggtaaataaactactagctagattaatgaagaagatacaaataaacacaattagaaataaaaaaaagagacattagcactgaccccacaaaaatatactgaagtctgctatgcatataaacaaacaaacaaacgaaatctagaagaaatgaaaaaattcttgaacaaacacatcctcccaagactgaacacacacacacaaaaatcaaagccctgggctgagtgcggtggctcacacctgtaatcccagcactttgggaggctgaggtgggtggatcacctgaggtcaggagttcgagaccagcctcaacctggggaaaccccgtcactactaaaaatacaaaattacccaggcatagtggtgcatgcctgtaatctcagctactcgggaggctgaggcaggagaattgcttgaacctgggaggcggaggttgcggtgagccgagatcgagccattgcactccagcctaggcaacaagagcgaaactccatctcaaaacaaacaaacaaacaaacaaaaaatcaaagccctaaatacatagataagctcaaaatattgaattagtaataaatagcctaccaactaaatgaagctcaggaccagacatactcacagctgaattctaccagatgtacaaatagaagctgatattatttttactagaacaatttcaaaagattaaaaagaagaaactcctctccaactcattatgtaagaacagcatcattctgataccaaaacctaacagagataaaacaaaaaaaggcaacttcaggccaatatccttgaaaattgatgcaaaaatcttcaacaaaaggctgggcctggtggctcatgcctgtaatcccagaactttgggaggccaaggtgggccaatttcctgaggtcaggagttcaagaccagcctagccaacatgatgaaaccctgtctcttctaaaaacacacaaaaaattagctgggcatggtagcacacacctgtaatcccagctactcaagaggctgaggcaggagaatcacttgaacctgggaggcagaggttgcagtgagccaagattgcaccactacactccagcctggatgacacagtgagactccatcccaaaaaaaaaaaaaaaaaaaaaaaaaaaaagaaaaaagaaaagaaaagaaatcttcaacaaactactggcaaaccaaatccagcagcatatcaaaaagctaacccactatgatcaactatggtttattttggggatttaaggtttgctcaacatacagaaatcaataaatgtgattcatcacataaacagaattaaagacagaaagcacaagattatctcaatagatgcacaaaaagctttcaataaaatttaacatttttcatgttaaaaaccctcaacaaactaggcattgaagatgcatacgtcaaaatagtaagttatctatgacaaacccacagccaatatactgaatggacaaaacctggaagcattccttcttgaaaactggcacaagacaaggatgccttctctcaacactcctatattcaatataaaattggtagtcttagccagagcaatcaggcaaaagataaaaataaaaggcatccaaacataaagagaggaagtcaaactatccttatttgcaaacaacatgattctacatctggaaacccatatactctcagcagaaaagctctttaaactgacaaacaacttcagtaaagtctcaggatacaaaagaaatgtacaaaaattagtagcaaccctatatatcaagaacacctaggccaaatccgaatcgaaaacacaatcccattcacaactgccacagaaaagaataatatatctagaaatacagataaccagaaaggtaaaagatctctatgacaagaattacaaaacaatgcttaaagaagccagagatgacacaaacaaatggaaagcaactttatgctcatgaataaaaaagatcactatcataaaaatggtcatactgcttaaataaatttacagatgtaatgctaatttaatcaaaccaccaaaatatttttaacagaactaaaagaacaaactattttaaaattcacatggaaccaaaaaagagcctgaatagccaaggcaatcataagcaaaaacaacaaagctgaaggcattacattacctgacttcaaactacacaacagtgctacagtaaacaaagcaacatggtactggtacaaaaacaaactcataggtcaatgcaacagaatagggagcccagaaataatgccacacacctaaaaccatctgatcttcaacaaaggtgacaataggaatgtgggaagaatttcctatttaataaatggtgctagaataactagctagcactatgtagtagattttttataacaccatataaaaaaatcaactcaaggtaaataaaagacttaaatgttaatcttaaaaaggatatattttaaaaaaccctggaaggtaagaagtgccattctagacatagaaactggcaaagatttcatgatgaagatatgaaaagcaattgcaacaaaagcaaaaactgacaaatgggacctaattaaactttttcacagcaaaggaaactatcaacagagtaaacagacatcctacaaaataatagaaaatatttgcaaactatgcttctgacaaaggtctactatctagaatccataaggaactaaaacaagtttacaagaaaaaaaaactaaaaagaagaccaaaaaaaaacatgaaaaagacgtttgtcttcaaaaggagacaaacatgtggctaacaagcatgtaaaaaaatgctcatcactaatcattagagaaatgcaaaagaaaaccacaacaagaaatcatctcaaaccagtgagaatggccattattataattcaaccattgtgaaaagcagtgtggtgattcctcactaaactaaaaacaaattaccatttgacccagtaacctcacaattgggtatatacctaaaaatatataaattattctatcctaaagacacatgcacaatcacgttcattgcagcactattcacaacagcaaagacatggaatcaacctaaatgcctatcactggtagactagataaagaaaatatagtatggttgggcatgttggcacacgtctgtaatccagcacttcgggggatgagctaggtggattgcctgagctcaggggtttgagacaggcatggacaacatggcaaaatcccatctataaaaaaaaaagtacaaaaataaaaattagctaagcatggtggcacagactttagtcttagctacttgggaagcttaggtagaagaggattgcttgagcctgagaggttgaggtttcagtgagccaagatcacaccactgcactccagcctgggaaaaaggtgagaccctgtctccaaaaataacaaaaaaattaaaaactttattaataaacttaataaaaacaaaatatgggctgggtatggtggctcacacttgtaatcccagcactttgggaggccaaggcggcagatcacctgaagtaaggagttcgagactagcctggccaacgtggcaaaaccccatctatactaaaaatacaaaaattagctgagtatggtggcacacgcctgtaatcccagctactccagaggctgtggcagaattgcttgaacctgggaggtagaggttgcaatgcgccgagatcaagccactgcactccagcctgagtgacacagcaagattccatctcaaaccaaacaaacaaacaaatatggtacataaacaccatgaattcatgaaatactgagtggccataaacaacaacaacaaaaaaaacaagattatgtcctttgcagcaacatggatgaagctggagatcattattcttagaaaactgatgcggaaacagaaaaccaaatgcatgttattatttataagtaagagctaaataagaacacatgaacacagaggggaaaaaagacactgaggcctagtagagggtggagggtgggaggactaaaagggtcagaaaaagtacctttttggtgctatgattagtactgcagtgacaaaataatctgcacaccaaactcccatgacataattttagctgtataacaaagctgcatgtgtacccctgaaccaaccaaaaataaaagttaaaagaaaacaaagtccctgggttggagagagtgcaatgcaggtggaaggactggtttgtcctatagatagtggcccaggtggggctgtactctgatttatttctgggtccatgcaggcagataagattatgaaccctaggctggtggagaaaacaggttgctactgcagattcagtgtctgaaaatagagatatgccaggagacttgtagacacttttgtggtttttggccaaaaaaaccactaggatcaaaaatgctgtggtaaaattcctgagggtggtgccttgtccagagaggagtgtggacacatcaatgtcaagtgggtgtttgtgagtgggtagaaatcctctgctggcagctgtggcaaaagggggtttgtcatcagatctcttttaagttttcagtcctctgtcaccctgggaggagatctgaaatcaaagaacaaggggcagtgtgacagcctgtgtagaggagatcagagcttcccattcccagacacccagagtttcattccaggccaggagtctgtgatatctttcttctggcaccaaatctgcagagtttgatgaacaccaacaattctccaacagcaactcattgtctaacacttgaattctgacaccacccagagtcagcacagaccctgattcagggctcagtcccacaacattgtcctcactgcagatgccagtcacaaaccccatgggctcatctatgcttctgacctactgtttaaaaattggggactcccataacctttttgaaattcaataacctgatacagctactcacagaactcagcagaacactagttatacttactggcttcaaataaaatatacaacccccaaaaagtcaaatggaagaaaagtatagaaccaagaaaagaggtgggaaaagatgaagcatatagataataaatagccgggattagtaaaattctctatcctctgtgttctccaggaacacttatgaaaagaaaaacccttctcatcatgacttagatggtgctcttttcttacctactacacaaccaggaaaacactctgcatattttcttcttcttctcattaaaaaaatcagctgaatttgccttcagtggtcaacataaaataccttttaatcaaacttaagtttattttcttcccacaggctcctgaactctgagctactctcagtccgagccaccatacaacctcattttatgctactgcagattcagtgtctgaagaacactcctaagaacacactgacttcagggtaaaacattctctgatctaaaatctgattatttcacccttcatttaaacattcccctcaccttctttctaatcttatttgcttttccctaggaaaaaaagcccttttctacctaatctttgcaatccttaaagatcttatagttggtacttcctcctgttgtaatactcctttggaattcaattttttttttaatgtacgtctaactggtttattttaaaacctctcgaatctgcctcaaaacagtaacaatttactgtttaacaatttagggctagggttcagtttagggttaggtttagggttccgtaagacacccccaaacctcttctatcttaaccttaactgcatctgcctgtggggccccagctttccagggctctgtagcttctctcactatagaggcttcttccatggctgcggtaagcaggctgggacatctgcaggaaaggctttccagaaggaactaactgggcctttaataacctccgtctgctggctcaaaattaaccttagcttgcagtcattaggctcaagctttaatttaccatgtcagagtcattcacttagtttttgaaattgtgtttgaaaaatccagcaaaatgattcaaaaacagtgttcatataagaaaattttaaggtgcttaccttttgtacctcagtaagagaagcaaatgtatttatttcttttggacaataaagcattattttattttttgtattaaaaatcatgtggtaaacagttatatgggaacacttctaggaggtaccaagtttcatgacataaaatttaccattaaactcagaaatcgaaaaacaggatatagaacaaagatatttatttttgcaaattcaccctgcaagaaaagaaactgatgttttcacgaatctgtgtaactcaccaattacctaccgcattttcttgtggaaatatattaattctctatagccaaaatggaagaaaaatttttatttttttcctcagtagctaacattctaaaagctagatggaattctatttgaaatcactcagccataaaaaacacacctgagggccgggcacggtggctcatgcctgtaatcccagcactttaggaggccgaggcaggtggatcatgaggtcaggagattgagaccatcctggctaacacggtgaaaccccgtctctactaaaaatacaaaaaaatttgctgggcgtggtggcgggctcccactatttgggaggctaaggcaggagaagggcgtaaacctgggaggaggagcttgcagtgagatcccgccactgcactccaacctggggacagagcaagactctgtctccaaaaaaaaaaaaaaaaaaaaaaaaagtaacacctgaaaaaactcctaaattcactctgagaaaataaaagatgaatgagaattttcaacaaataaaatatataattagatattgttttttgaaattcacctttttttatgccctttgtaaatattttcttacctttcaagccctactaataaaatgcaatttacagttaaaaaactgaggtcagccgggcacaggggctcacacctgcaatcccagcactttgggaggccaaggcaggcagattacttgaggtcagaattttgagctcaaacagcacggtaaacatggcaaacccccatctctattaaaaatacaaaaagtagccaggtgtggtggcaggcacctgtagtcccagctacttgggaggctgaggcataagaatcacttgaactcgtgatgcagaggtttcagtgagccgagattgcaccactgcagtccagcctgggtgacagaggaaagcactgtcttaaaaaaaaaaaaaaaaaagggccgggcgcggtggctcacacctgtaatcccaccactttgggaggctgaggcagccagatcacaaggtcaggagttcgagaacagcctggtcaatatggtgaaattccgtctctaccacaaatacaaaaattagccgggtgtggtggtgcacacctgtagtcccagctactcaggaggctgaggcagaagaattgcttgaacccgggaggcagaggttgcagtgagcagagatcataccactgcactccagcctgggtgacagaatgagactctatctcaaaaaaaaaaaaaagaaaaaaaaaactgaggtcaaaataagtgaacaatgcatttaatcatttcaaggtacagatatgtctgactcatgtgtcaagtcaggccatccaattacttgagagattctcccaccccatcctgttcacttaagtgctcagtaaccattctctcaggagactctgaactatgccccagtgagtgccccaggtacattttactttgcaagttcttgcaccatctcactggggtcagtttttttttttgtctttggagtgctattttttttcacaaactttttaccatttttatttcactatttttctgtcccctaagagaatccaggggcaaaaattattttggtttccccttcaataccagcatctgattgtctgaacagcaatatgtctccaagaaatggaagctgcgttgggtaaagacaacactaatatctcaaggggttagctttccaaaaaaacagcacaccagaagatgcctctcagccccagggtattcacctgctctcttgagaggctacactccatatctcatgttgtgttatgggagaagagaggctacactgtgtacctcaggttgtcttatgggagaaaatgacccaggagctgatattcactagacgctctcgcagacatagccatggcgggtatcttagtttttccccagatagtactgaatctcaggtccaagaaaaaactgaagggtgtctgaggacacatctccctataaagtttccaaagggaaaccttgacccaaaacattctgatatctatgtctacggaaaacagaagaaaaaatatttacaaacagaaaacaaatctttttaaatgtgccatcaaatgctttgtcaaaaaatgattacaataggtatcaaaatgtaaactaaaggacaaatagttgatcatgtgaataagggaggggaaattggcgtttgggaatgtcagaaggaactggaaattaagtattttactgcaagccagagtcaggctggagaaatagggggtggcagatagacttgaggtcctgcttgggacacatgtgaaaaatgcaaggaaacagcaattccttgtggggtgtgaaaataattaagtggctggcagttagactgaggaggctctagtttctaatttctacttttaaaaaatctaattcggccaggcacggtggcttaccctgtaatcccagcactttgggaggccgaagcaggtgaatcacttgaaatcaggagttcgagaccagcctgaccaacatggtgaaaccccgtccctgttaaaaatgcaaagttagagggcatggtggtgcatgcctggaatcccagctacttggaagtctgaggcaggagaatcatttgaacctgggaggcggagattgcagtgagcccagatggcgccactgcactccagcctgggcgacagagtgagacttggtctcaaaaaaaaaaaaaaaaaatctaattcaaatgcattttttgtaaattactacattgggggaaaaaatttcaggcttaacacactataaactgccaattaacctctgattacataaccaagaaacttccatcttgatgttacaaattaagaaaccacaaggccgggcgcggtggcttacgcctataatcccagcattttgggatgccgaggcgggcggatcacgaggtcaggagatcgagaacatcctggctaacatggtgaaaccctttctcaactaaaaatacaaaaaagtaaccgagcgtggtggcgggcggctgtagtcccagctactcggaaggctgaggcagtggaatggcgtcaacccgggaggcggagcttgcagtgagacaagatcgtgccacagcactccagcctgggcgacagagggaagactccgtctcaaaaataaataaataaataaaacaaaacaagaaactacgtaactgtacctaaccaattattgaatgtggttttcctcgttatgcaccttataaaactctttccgtcaaaccccttcaatagaccattaactacaacccatagctgggtgctctacaattttggaatcactctttgattaaattctttaatatttttgaggtgacttccataaatttttaataggagaaaacaggaactgggagcctcacggaccaaagctcttcccattcatgaacccacaccccaagtcaggattctcctctcacgaccctctcatggtccctgcacatctgggagagactccgcgctgcgggtgcagagcggccccaagagggctccaggccagggcacaatcacagcgcagggaagagacaggacgcccggggaccgggtgtcagcgcagcctccatcttatggctgaaccggactgaggtcgagctaggcaagaactcggggcacagatgtggagctgactgcggggaggcctgagtcccgccacagccacttcccaccggttccaagcagcccgggccactctctcagtgtgtcggacccggcacactcaccatttctaggcttccagggggtcctggcgacttagttgtggatctcccaatacctgcaggtcatagggccacagaggctgggactctaggagcagaggacacacagcagtaaggacgagaccttgacctccggctgcagcgagagacaaaggaccgaccacatcccggaagccgacctgtcccctccagctgcctgcctgattggacgttcccagcccagcatccctgattggataatgtttaaggccccgccctttcaggccctgagtgacagaagatgtgatcagatgctgggctgaatgaagaaagagagccagcgtaggctgcaacctttcaggcagggcttcctccctgagctgagccaggcccaccccagagcatgcgaatattctatctcttctttactctctctctttttaaatgtattcgaaatgtgaacgaatatattttactgccatgttaataatacataaaacttttgttccagagtaaattaatttttactttagtcatagtgtgttatcaatactaaaggccgggcgcgatggcttacgcctttaatctcaacagtttgggaggccgaggagggcggatcactggaggtcagaagttcaagaccagcctggtcgatagggtgaaaccccttctctactaaaaatacaaaaattagtcgggcgtggtggtgggcgcctgtaatcccagctactcaggaggctgaggcaggagaatcatttgaatccaggaggtggaggttgcagtgagccgaggttgggccattgcactccagcttgcgcaacaagagtgaaacgccatctcaaaaaacaaaacaaaaaaattaaacttattttagtaaaaccttataaataaatccatcaaatttgtcacttttccaacactctacattttcatatatattttataatctcacatttttttaactttttctattttattttaatagatttttttaacttgaaacaaccttaaattattattattattattattatggttgttgttgttttttgagacagagtcttgctctgtccaccaggttagagtgcaatggcatgatctcagctcactgcaacctccgcctcctgggttcaagcaattcttctgcctcagcctcccgagtagctgggattacaggcgccgtccaccacacccagctaatttagcatggtgacctgaacttgtagttaccagctattcaggggctgaagtaggagtattgcctgagcccaggaggttgtggctgcagtgagccctgatcaagccactgcactccattctgggtaacagagtgagaccctttcttaaaaaaaagacaaagcatataaccttaaacttatgggagtttggggctttttatttttgtcttaaattattatatttcaatagttttggggtatacgtagtatttggttacatggataagttcttttgtggtgatttctgagatttacgtgcaccaatctcccaagcagtgtgcactgtacccaatgtgtagtctttcatccctcaccccctctcccacccttcccactgagtgcccagagtccattatataattcttttatttatttatttatttattttctgagacagggtttcattcttgttgcctgggctggagttcagtggtgtgatctcggctcaccacaacctccacttcccaggttctagcgattctcctgcctcagcgctcccaagtagctaggattataggcatgccccaacatgcccggctaattttgtatttttagtagagacagggtttctctatgttggtcaggctggtcttgaactcccgacctcaagtaatcgcccgcctctgcctcccaatgtgttgggattacaggcgtgagtcaccgcactcagacccattatataatttttatgcctttgcatcttcatagcttagctcccacttataagtgaggacatacaatatttgggtttttatcccctatttcttttttttttttttttttgagatggagtttttttttgtgatggagtttgctgtgattacaggcatgagccactgtgcctggcctattttttgatgttttaattatggtcttttctgtttgtttgtttttgagatggagtctcgctctgtcgcccagactggagtgcagtggtgcgatctcggctcaccgcaacttccgcctcccgggttcaagcgattctccagcctcagcctcccgagtagcaggcattacagacacacgccatcgcgccctgctaattttagtatttttagtaaaggcgtggttttgccatgttggccaggctggtctggaactcctgacctcaggtgattcacctgtctcggtctcccagagtgctgggattacaggcatgagccaccatgcccggccaatcatggtcatttttgcaagagtaaggtggtatcacattgtggttttgatttgcatttccctggtcattaatcattagtgatgttcagtattttttttttctatgtttgttggccatttgtgtatcttcttttgagaattttttaagtcccatctgtctttgtttttgttgcatttgctttgggattcttggtcatgcactctttgcctaagtcaatgcctggaagagttttttcaatgctttagaattcgggttgtttcaggtcttagattaaagtatttgatccatcttgggttgatttttgtataaggtgagagatgaagatccgtttttttttatttttttttatttttttgagacaagtctcgctctgttcccagactggagtacagtggcgtgatctcagctcactgtaacttctggctcctgggttcaagcaattctctgcctcagcctcccgagtagctaggattacaggcacccgccaccatacttggctaatttttttttttttttttttgtatttttagtagagacagagtttcaccatcttggccaggctggccttgaattcctgacttcatgatccaaccacctcgacctcccaaagtgctgggattacaggtatgagccactgcgcccagctgaagatctagttttatttttcaatatgtggcttcccaattatcccagcaccatttattgaatagggtgttctttccccactttatatctttgtttactttgtcaaagatcagttggctgtaagtatttgggtttatttctgatttcactattctgtttcattgggctacatgtctatttttatacccatacaatgctgttttggtaactatagccttgtagtatagtttgaagtcagataatgtgatgccttcagatttttttgtgtgtgtttttggttttgttttgttttgttttatttttcttagtgttgctttgactatggaggctctctttttaatttatataaattttaggttttttttttagttctgtgaagaataataatgttattttgatggaaatcacattgaatttgtagattgcttttggtaggttgatcattgtcagagtaaaatcgctactcatccataagcatgaaatacatttccatttgtttttgttgtctatgatttctttcagcaacgttttgtagtttttcttgtaaagatctttcaccactttggctagacatattcctaacttttttttttgcagctatttttaaatgatgagttcttaatttaattattagtttggtcactgttagtgtacaccagtgccaccaatttgtgcacattcattttgtatcctgaaattttactgaatttatgtatcagattgaaaagttgttttttttttctttttgagacaaggttttactctgtctcccaggctggagtgcagtggcatgatctcggctcactgcaacctctgccacccgagttcaagtgattctcctgtctcagcctccctagtagctgggattatagccactcgacaccatgcccggctaatttttgtattcttagtagagacggggttttaccatgttggccaggctgctcttgaactcctgacctcatgatctgcccgcctgggcctcccaaagtgctgggattacagacgtgagccaccacgcccagctgatgctgtttattttttgctttactctgattgctctggctaagacatccattagtgtgttaaatagaagtggtgagagtgggcattattgtcttgttccagttctcagaaaaaatcctttcaactttttcccgttcagtgtaatgttggctgtttataatagagagctttttttttttttttttttttttttttccagacagagtctcactcagcccaggctggagtgcaatgtcaggatctccgctcactgcaatctttgcctcctggactcaagtgattctcccgcctcagcctccccagtagctgggaccactaggcacccgccatcatgcctggctaatttttgtatttttgaacagacgagatttcaccatgttggccaggctgatctcaaactcctgacctcaggtgatctgcccacctcggcctcccaaagtgctgggattacaggcttgagccaccacgcctggcctgtcatagatggcttttatgaccttacaatatgttccttctatcccgattttgctgaggattttaatcataaagggatgctggattttgccaaatgatttttctgcttatattgatataatcatgtagtttttggttttaattctgtttatttggtgtaaaacatgtattgacttacctatgttaaatcatctctgcatccctggcataaaatgttctcgattatggtgtactatcttattaatatgctgctgtgtttggttagctagtattttattgaagatttttgcatttatgctcatgaggaacattggtgtgcagttttcttttattatgtcttttcctgatcttggtattagagtgatattggcttcatagaatgatttaggaaggattccctttttctctgtcttttggaatagttgcagtaggactggtaccaattatctgaatgtcagatagaattgagctacgaatccatcttgtcctggactttttttgttggcttttttttttttttcttgagtcttgctctgtcacccaggcgggagtgcagtggtgtaatcttgactcactgcaacctctgcctcctgggtttaagtgattctccttcctcaacctcccgagtagctggaattacaggcacaaaccaccatgcctggttaatttttgtatttttagtagagatggggttttgccatgttgatcagactggtttcaaacccctgacctcaagtgatccacccacctcatcctaccaaagtgctaggattacaggcatgagccactgcacccagctggcaattttttattactagtttaatcttggtacttgttattggtctgttcagagcttttatttcttccgggtttaatctaggaggtttgtatatttccaggaatttatcgaactcctctaggttttctagtttgagcatgtaaaggtattccatggtagctttgaatgatcttttatttctaattgagcatatttggatcatagattcaatgctgtccccatcaagctaccactgagtttcttcacagaattagaaaaaactactttaaatttcatatagaaccaaaaaagaggctgcattgccaagacaatcctaagcaaaaagagcgaagctggagacattatactacctgacttcaaactattgtacaaggctacagtaaccaaaacagcatggtattggtatcaaaacagatatacagaccaatggaacagaacagaggcctcagaaataacaccacacatctacaaccatctgatctttgacaaacctgacaaaaacaagcaatgaggaaaggattccctatttaataaatggtgttgggaaaactggctagccatatgcagaaaactgaaactggaccccttccttacaccttatacaaaaattaactcaagatggattaaagacttaaatgtaacaccccaaaccataaaaactctagaagaaaacctaggtaatgccattcaggacatagacatgggcaaaggcttcataactaaaataccaaaagcaatggcaacaaaagccaaatttgacaaatgggacctaattaaacgaaagagcttcttcacagcaaaagaaactattgttggagtgaacaggcaacctatggaatgggagaaaatttttgcaatctatccatctgacaaagggctaatatccaggatatacaaagaacataaacaaatttacagcagaaaaacaaacaactccatcaaaaagtgggcaaaagatataaacagacacttctcaaaagaagacatttacgcagccaacaaacatatgaaaatatgctcattatcactggtcattagagaaatgcaaatcaaaaccacaatgagataccatctcatgacagttagaatgcaatcactaaaaagtcagaaaacaacagatgctggggaggatgtggagaaataggaacactttcacactgttagtgggagtgtaaattagttcaaccatagtggaagacagtgtgagaattcctcaaggatctagaatcagaaatagcatttgacccagcaaccccattactgagtatatacccaaaagattataaatcacatgaacacgtatgtttattgcagcactattcacaatagcaaagacttggaaccaacccaagtgcccatcagtaatagattggataaagaaaatgtggcacatatacaccatggaatactatgcagccataaacaaggacgagttcatgtcctttgcacggacgtggatgaagctggaaaccatcattctcagcaaactaacacaagaacagaaaaccaaacattgtatgttctcactcataagtgggagttgaacaatgagaatgcatggacacaaggaggggaatatgacacactgggacctgtcagattgaggggggctaggagatgaatagtatcaggagaaatacctaatgtagatgatgggtggatgcgttcagcaaaccatcatggtacatgtatacctgtgtaacaaacctgcacattgtgcacatgtgtctcagaacttaaagtgtaataataaaaaagaaaaaaaaaagaatgctgaaggcagtttcttttacttaaaataaaatgactcaagaaaatgacacataatcatataaacatatatataaacaaatttttttgagatggagttttactcttgttgtccaggctggaatgcagtggcctgatctcagctcactgcaacccctgccttccagtttcaagcaattctcctgcctcaacctcccatgtagctgagattacaggtgcctgccaccacgtctagctaattttttaaaattttagtagagatggcatttcaccatgttggccaggctggtctcgaactcctaacctcctgatctgcccacctcagcctccgaaagtgctgggattacaggcatgagccactgcatctggccaaaagagaaaagaaaaaaaaggattactttcttggatagacatgcacatacaaaaaaatgaaatttcttagcataatcataatggtgcagaaaacatttttaagtattgtctgtaatttgaaaaaaatttagaaaattattaaaattttgagagtaaaatctttgtatgcaactgaaatttatcttctaccagattaaaatatattgttatatcttttagaggttttgtgtaatttccaaggtaccacaaggtaccacaaaaaaactgtaatctgtatagatatgcaaaacaaaataagaaaaaattaaaagcatatcagtacaaaaatcaaaatgacacaaaggaagacacaaagagagaaaattagagacgaagatacaacaatcaaataaaacaataaaataacattactaagtctttctgtttcagaaaattatttaaacatgtatataaaatgagctttccaattaagagacatacttgtaataaaggaattagataattttaaaaaccaagatccaacttgcctttctataatcgagtcatcagagatctaatgataaaaaagactgataatagcaggatggatgtagatattccatgcaaatattaattaaattagagcagaagaggtcaaaataatgttactttagctgtttatttatttatttatttatttatctatttatttattttgagatggagtcttgctctgttgacaggctggagtgcagtggtgtgatctcggctcactgcaacctctgcctcccaggttcaagagattctcctgcctcagccttccaagtagctgggactacaggtgcatgccaccacagccagctaatttttgtatttttagttgagacggggtttcaccatgttggccaggatggtctccatctcttgacctcatcatctgtctgccttgtcctcccaaagtgctgggattacaggcatgagccactgcacccagcctacagtagcatatttccataccccaatttgtataataaaaacaaaacaagacagcataatagtaagagaacagagaacttgaagacaagtataaaacaatcattcctaacagaggtacagagaacactcctcaacaacatcaggatacacagccttcccaacagctcataaaacattgtccttgatagaccatctgttaggccaaaatagaagtcttaacataatttttaaaactaaatttatatggattactttctatgaccaaaatgaaatgagagcatgaaacaataatagaaaaaaactgaaaaagttataaatgtatagaaattaacacacttaggagcatgctcctgttcaaaggttgagataaatattttgaagatatccatactcttcaatgtaaactacagattcaatgggatgttctttaaaagttcacactacattttgaagaaacagaaacagcaactccaaaagtatacggaatctaatgagacaataaaatacccaataatcttcaaaaaaagaaataatgttaaaggcattacagttcctgattttaaaactcattacaaatctacaaaattaaaacaatttggtgtgagtataaaagtaaaaatgtagactaataaaaaccaatgcagcacatatataaaatttaacatatatagtcatatgaagaattatttacatactcataataattgcagcattgttacaaatttttagtagaggccaggtttcgccatgttgcccacgctggtctcctaggctcaagtgacccacccatcgctgccttccaaactgctgggattatacgtgtgagccacctcacccggcccaatttattttctttttttaaggttttttttctgaaaattttatgatattttggatgggaatgtattgccctgttttgtatacattgtaatctttaattgatatttggacattttttaaaaagctagctgtcacgatcttttatcatgtagctttgtcctggtatagtctgaaaacaattgtctttgctagagattctgggagtctttcgaacatgttcttagtatgtgtcttgtctgaaatttggtgtttttttttttagttaaagaagtttatttgtctttcttcttaatagtcttcacttgctacacctgttccctgtctgtggcactgcagcctctctgctgctgttacatttacctctggtctctgcagacccgaactgtcattccaaagtataccaccatttcattcagcactttgtcactttgtgacctccatctctgccaccatgaccactttgttcatgggcctattgggcaatgacggggtggctggggaaagacgctgagtgatgtcaacaaaacaggtcatcctatccacttgattattaaaaatctcctctgctgaggtcacccattggtgagcactcacatgggatacaaatatcttcacagtttttgaccactcaggaggttcattcacatacctcttccccaaatttctttgtcaccaatttttcaatcatgcttcttccaagtacctggcaatccagccaaacaattggctaaagcccatgattcagtatgtaatcacacatctggccatttctccttccatgcaaagtgcacaaccaggtgcactgctcaaagttctgcccactgggaagatttcccttcaccactgtctttcagggatgtcctagaaaggaactgtagtgccgcagctgtgtccactttcaggtggtgcctgcttattatacagaatcatctgtaaacgaggccatagtcttttcttcctctgtcaaatgatcacagggaactcccccttaggtcatcagtgcaggctgggggagagaaggcaggatggcagaagtggagaccatgggcatttgagccactttctcatttgtgccttcagaaactgctcaagcccaatcacatatatactacctccatttgatgatggaatgctgttttgcatgacctactttatggttagatgggtcagaaagcacccagttcatgataggcagttcaggtcgcatggtgacttgacaacccatagtcaaaagttcagtttttaccaaagcccagtaataggccaagagttgtctctcaaaaggagagtagttatctgcagaaaatggcagggctttgttacaaaatcctacaggctggccaggcacagtgtctcattcctgtaatcccagcactttgggaggccgaggcaggcagatcacctggggtcaggagtttgagaccagtctggccaacatggagaaaccccatctttactaaaaatatgaaaattagccaggcatggtatggtggtgggtgcctgtaatcccaactactcaggaggctgaggcaggagaattgcttgaacctgggaagtggatgttgcagtgagacaagataatgccattgcactccagcctagatgacaagagcaagactccatcaaaaaaaaaaaaaaagaaagaaagaaagaaagaaagaaagaacaaaattctagaggcctctgctgtgattcacctaagggggcctgccaaaggctacaaatagcatccttattttacactgacaactcaagatccattggatctcctgggtaatatggcccaagtggcagagcagcttgcacagcagcctggacctgttgcagagccttctccttttctggaccacactcagaactggcagctttttgggtcactcaataaatgggccagagtaacacacccaaatgaggaataggttgcctccaaaacccaaataggcccactagacattgtgcctctttcttggttgtaggatgggccaaatgcagcaacttaccttttaccttagaaggactatcttgacaggccttggaccactggacccctggaagttttactgagctagaaggtctctaaattttagtcagacttattttccatcctctggcatgcaaacgtctcatgaataagtctggtgtgtttgctatttcttgcttactggattcaatcagcataatgtcatcaatgtaatggaccactgtggtatttgcaaaagcaaaaagtgatagaggtgtctttgaataagattatgacacaaagccagagagagcgataggatagtaaaggtatattgccggccttgccagctgaaagcaaattgcttctggtgggctttatggacaggaattgagaaaagggcatttgctaagtgaatgtctgcataccaggtaccaggagatgtggtaatttgctcaagcaatgaaactacatctggtacagcagctgcaattggagttaccacttgattaacctcatgataatccactgtcattctccaaaatccatctgtctcctgccaaatgagttgaacgggatggggtgggaatcacagcctctgcgtctttcaagtccttgatgctggcactaatctctgcaacccctccacggatgcaatattggttttgatttactatattcctaggtagaggcagctctaatggcttccatttggcttttcccaccctaatagccctcaccctactactcagagagccaatgtaggagttctgccatctgctaagtatgtctatgccaattttgcattctggaactgggtaaatgaccacagaatgagtcttgggacccactggatcaaccatgttggacctgagctaaatttctattaagtacctgacctccataagcttctactttaactggaggaccacagtgatgttttgggtcccctggaatcaatgtcagctcagagccagtgtttaggagtccccaaaatgtccaatcatttccctttccccagtgcacaataaccctcataaaaggccagagatatccttggggaaagatgagagaaagattcactacataaattgtcagtagtgtagtggggtttttcctcaagggaatccggcctcccctttattcaaggggttctgggtctgtaaactggctcaagtctggaaattgattgaggggccatgattctctgtttttatgtttcaaattagtcttttgtccattcaacctagaatttttctgcttgcataaattaagtaggaatgcagtaggtttcctatcaattttacttctaagaacaccgtgatgaatcagccaatgccagaactctacacaagtcagactattctgattgccattttgcctctgctgtccattacagtagctatgcccaccttgcctttgatggttggcccctgccaccatgggatccaattattcccactgtatttaaattttgtagttgagtgaccggggttcccactgttagatccgacatgcagagaagagcaattataaggttcttcaaagattcaggtgctgccttcacaaatctattttgcaaggcaatggtcaagggtatatcttctggaccttccctgctagaattagtaggtctaaagtgactaatccactccagtatcccaatctccctaagccttttgattcctccctctacattaaaccaagggatatcaggcatttccaggtccctcacagtgggccatcttttaatctatatttcagctaaccgagcaaataaactattaaaaccttttttaattccccaagctgcaacattaaatgcagtgttcctacttagttggcccaaataaacaaattcagccttgttcaactctatgttccttccaccattatcccacacccttaatattcatccccaagcctgttctccagatttctgtttatataaattagaaaactcaagcagttctttttgagtgtagtgtacctcctcatggggcacactctcaacctcacctctaggggtctgctgggactttagtctacttatatgcctagaagcaaacaggggtgttgagggtggctcctgaaaagaatcaacattattttgcctgacaactgcctcaggggaggccatcagtgttgcctcaggcagtgcagagtttatctcagacaaaggtggaaaggctaatggcagcacggatcagaaaggggatgttgccactactggggatggggaagctctttcttctaacaaaaaaggctcatcagagtttacaaactcagagcccctagcttcatcagggtcctcccacacgtccccattccaagtggcagggtcccattcttttccaatcaatgcgctcactctaacagtagacacctggcgaggctgtgcatacaccttttgttgcaggtcagccactagcataataagagtttgtgtctgtttttgcacaatttcagctctttctctaccagagatgagactctcacacagggcaatcttagcagatttgaggctcagtaactgcttctgaagccaaaagatagaatccctgagttcatcattttctatcatcactttgttcactgaacttatgacaaccagcttcattatgttccttggttctccacatatggtcaaacctccgcctcccagttcaagcaattctctgcctcagactcctgagtagctgggattacaggcacccaccaccacacctggctaatttttgtatttttagtagagagggggtttcaccatcttgaccaggctggtcttgaactcctgacctcgtgatccacccacctcgccccccccaaagtgctgggtttacaggtgtgagccactatgcccagctggtcaaaggtattatgtatagagtcactaaactccttgcctctcatgaatgataaatcaggagtgtcaaatgcatttattttacataactctctaaacagttcatcccaaagactatcagtgttttccatactattagaagtagatccttaacatttttgggtctaatcatattaagcagccaattccagaaaccccagaatcaaaaaaggaacttcatccttaatattctgttcctctagaaccactcctggtacaaaaatctgtattagtcagggttctctagagggacagaactaatggaatatatatatccctgtgtgagatatgtatgtgtatgtgcatatatatatatatatatatatatatatatatatatatatataaagtatataaaggggagtttattaagtattaactcacagaatcactagacccacaataggcattctgcaggctgagaatcaaggagagccactccgagttccaaaactaaagaacttggagtctgatgttcaagggcaggaagaatccagcacaggagaaagatgtaggctgagaggctagaccagtcactcttttcacatttttctgcctgcttacattctagccactctggcatctgattagattgcgcccatccagattaagtgtgtgtctgccttttccagccaactgactcagttgttaatctcctttggcaacaccctcacagagacacccagatttaatactttgtatccttcaatccagcctagttgacactcagtattaaccatcacacctagttaagagagtcaacatctctccatttggctgagtccaggtgaaacagtcatcaccatttttctaagctgaatccagaaatgagtcagcattccatcagtgggcagattcacatatcagtcacaattccaactgtgaatttttttggtgtgtgagatttagaacctcaccagtgggctctgtttatatgtgaaggtaacaatactaactgttagctttgtctgcatattgaagtcacaatctcacctgcgtgtggggccccgtgataaaactttgcattgccagagggctttatgtaatttccataagtgtcataatcttctgtgactctcatacaggtagaagacccaggaccctaccagtttactcaagcctagctataatagtcaacatatattttattggctggatccaggtatgagagttatcaatgtgcctgtgagctaactttataaataggtcaacatcacacctgtggctggatctacatatgacattccagctgtggactgtgtccatgtacaagattcaagaccttaccagaagtctctgtccatgtgtgagggtgacactcaacttttggcaggatgagcatacaagagtcacaatctcacctgtgtgctgggtgcagttatatgtcaaaatcccacctgtggaaaagaaacaagctaagagagtcacatattttaagttctaggctaaagatatgttacaatatgccttgtgggcaaggctcaggaaagagagttacatcacctgagtgatgtgactggtgatatgtcacaatgccttctatgggcatggctcaggcaggagttttacattatttttgtgttggccctatgatatgtcacaatccccctccatttgcgtgacttagagaaaatagaagagtcacagcacctaaattatgaccacagaggtatatcacaatacctcctgtgggcagagcctaagatagagggtcacatcacctgcaatctgggctcagtacaatgtttcaatctcccctgaggccagagcccaggcagaagaggagaattatatcacctaagtgcttgggcctgtggtatgtcacagttctttttttttttttttttttttgctggggggtaggcagaatgcaggcaaagtatttcacaatacctactgtgggcagggcccaggcagtacagtcacatcacagaggtgctgggctcagtgacatctcacagtgactttgtggacagggcccaggctgaaaataagagtcataagacctaagtgctgagcccagtgaaatttcacaatagcctctgtgggtagggctcaagcaagagagtcacatcacaatcttttctgagagctgggcccaggcagggaagtaaaatcactcaggtgctaggcaaaagtatatgtcacagtcatacttgtgggaagatctagggctaagattcacaattccacacatgtcccagcttcaggtaaaagcgtcaacacctcctgtgagttgcatccaagtacctgagtcacagtatcaatgatgaactggatccatgcatgagagtcccaattccacctgtagactgtgtgttgtgttggccctatgatatgtcacaatccacctccatttgcataacctagagaaaatagaagagtcgcagagccttctgtgactcgtattagagtcaaagccttctagttgtgttgaatcctggtcttagagtcaccatccacctgtagacaaaatccacataaaacaattacaatcccaactttcgactgtgtccaggtgtgagattcagaagctcaacagttttctgtatccatgcaggagggtgacaatttttactaggcgctggaagtgcatatgagaattaaaatctcagcttgttctgggtcctcttatgacactctctgtaccacccaagggctttacattgattgggtgagagtcacaatcccctgtgagatattaccactggtataaattcatgatcttgcctgttgccctaagtttgggtatgagagtcaacatctctcctattgtctgggtccaggtatgaaagtaattgctgtgcctcttagttgggttttatgagtcaccctcccacctgtggctggatccacacatgacattaaaaattccaactgtggactgcatctgtaagtgaacctgcaggttctgtccatgtgtgtgggtgacaattcttactctttgctgggtgtgcatttgagagtcacaatctcaaattttgctgagttatgtaatgacactttctgtacaacccgagggcattatacaatattagtgagcgtggtaatcctctgtgacatttatacaagtagaaaacccaaaaccttacctgttgccctaagcctaggtacaagcagcaacatatcttctattggtgggtttattgggcaagtgaattgggttcagaaattttccaccatccaactggtgtaataggttcatatgtgagactcaggccctcaccagtaagctcggcctatgtgtgagggtggcaattcaaactgttggctaggtgtgtataggagagtctcaatgtcacctgtgtactcagtcttgtaatgacactctgtattgcccaaaagctttatactatatgtgtgagtgtcataatcttctactacctgcctacaagtaaaagacttagaccccaaagcctagctaccagagtcaacatctctcttattggctgggcccatgtttgacagtcatcaccattcctgtgagctgaatccagaaatgagtcaccatcccacttctggcaaggtatacatatgacagtcacaattccagctgttgactgcattcactcatgagactcaggacctcaacagcagtctttgtccatgtgttatagtgacaatagtaactattgtctgggattgcatacaagaataaaaatctcatctgtgtgcttgaccacgttatatttcacaattttacctgtgggaaaggctaataaatgagagtaacatcaccataattcttcacctggaatatgtctcaatctcccctgtgggcaaggcccaggctggagaatcagatcacttgcatgcagggcccagtgacatattatattttctctaggcacagcccaggcaggagagtcacaacatttgggtgttgggctcagagatatgtcataatccctttttgggtcatgtctcctgcaacagaggagaggcacattgtgtagaaaattggtccagggatttgtcacaatgtcccctttgggtggtgcacaggcaggtgaggagagtcacatcacccagataatggaactagcaatatgtcacaatgcccccgatggaagggcaaagacaagaaagtcacataacctaggtaagaaaacctgacatatgtcacaattcatgctatgagtagggatcatggaaaagaggagagtcacataacctaggggctgcacccagatatatgtcataatcactgcagtgggcagggcccaggcatgcgaatcacatcacataaatgctgggcttagtgatatgtcacaatccccactgtgtacatgtcccagaatgaagtaaagagtcacatcatctacttgttgggaccaaagatatgtatcaatgacacctgtgggcagggaccaggcagaagagccacagcacctgtgtgctggaccctgtgataagttactatttatctgttggcatggcccagtcagaagaggcaaatcaaaccacctgggtgctgggcccagtgatatgtcacagtgtcttccataggcaaagcccaggtaacagaggagactcacatcaaacagttgatgggcccagagatatttcacaatgctccctgtgagcagggtccaggcaggaggctcacatcacctttgtgctgggccactatcttttgtgtgagcagaacataggaaaatgataagcattggctgggtgcggtgtctcatgcctgtaatcccagcactttcggaggctgaggagggtggatcacctgagatcaggagtttgagaccagcctgaccaacaaggtgaagccccatctctactaaaaatacaaaatactccaagtgtggtggcaggcacctgtagtcccagctattcaggaggctgagacagaagaattacttgaacccaggagcagaggttgcagtgaccggagattgtgctactgcactccagcctgggtgatggagcaagactccatctcaaaaaaaaaaaaaaaaaaagagagaaccgtcacatcatctgagtgctgagcccagatatgtctcaatctccctgtgagcagaatccattcaggagagtcaacatacatgggtgatgggcacagagatatttcataatgtccgctgtaggaagggcacaggcagaagtgtagcatcacttgagtattggacagtgcaatatgtcaaaacagccaatgtggtcagggcacaggcagaaatcacataacctgggtgcagggcctgacagtgcatcacaatgttctctatgggcagagccaaggcaggagaataggtcacatcagctaagtgcttggccaagtgatacgtcataatccctcctgggggctggaccaaggctgggaagtcagattgctcagattctgggcagaaagatatgtcagaatcacaccagcaggaagatcctgaaatgaaattaacaatctcacacatgtcccagtttcaggtttgggagtcaacaccttttgtaggtttggtttaagtacctgagtcacaatttcaacaatgggctggatttgtacacaaaagacccaatccctcctgaagactgtgtccccttaatgaagccacagcctcacagctgtggggaatcttggtctgagagtaaccaaccagcctatggatcagatccacatataagagttatttcttcaacttcccactgcctctgagtgggagattcagagcctcaacagtgggttgtgttcatgtggaaggatgacaatctttactattggctacctgtgcataagagtgtcacaatattacctgtgtgctgggccctatgaggacagtctctctactattcaagggctttatatgctattcacaagagtcagaatttgctctgagacctccatgctggtatgaacccatgattgtactcatggccctaagcccatgtatgagagtcaacatctctttaattgacttggtccagagaggagattactctgctgcctatgagatggttttagaaatgagtcaccatctcagttgtggtcagatgtttacatatgacagtcacaattccaactgtaagctgcatccatgtatgaagttcaagaactcaccagtactctgtgtccttgtgtgaatgcaataatcctaataattggtggggtgtgcacacaaggtaaacagtctcacctgtgtgttgggcctgtgatgacactctctgtatcacctgagggctttatacagtatgtgagggagtgaaaataatctatgaccttcctacaaaaaggagactcaggatcttacccatttctctaagcttagctacaagagacagtatctctcctggtgactggtatgagagtcactattgcacctgtcagccaggccaagatgtatgtaacaatcccatttgtcagtagagaatgagcaggatgatcacatcacccgagagctgggaaagggttatgtcacagtcatttttgaggccagggaccagggataaaagaaacatcaccttagtgctaggccaagggctatgttccactgttttctgtgggcaaggtgcaggcaaaacaaactcatcaccttgttgctgggcccagtgatatgtcacaattttccctgtgggcaaagtggaggctaaaaacaagggtaatatctcttaggttatgatgcagagatacatcacaaggcctcctgtgggcaggccacaggtagaaatcgccaatttcctaggtgttggagcccatgatatgtcaaaatacacaatgtatgcagggcccaggcagaagagaagagtcacataacttaggtgctgagcctagcaatacatcccaatttcttcttggacggagcccacacacttattacccaggtgttgggtctagctatatgtcaaaatattccctgaagggagagatcagggaggagtgtaacctcacctaggtgagaagatcagagatgttgccgattctgtgtaagtctcaggaataagagaagagtcaggtatcctagaaactcggctacattatatgttgcaattacccaagtgggcaggaatctcatgagaagagggtcacatcatgtagctgctgagctaaacgatgcatcacaattcccactgtgtattggtcccagaaagaagaggagagtctcatcatctaggtgatgggcctggaaatctggcatatgcatcctgtgggcaagcaacaggcagaagtatctcagcatgtctgtggtgggcttggtagtaagttactctcccttctatgggcatgacccaggcagaagaagtcacatcacctaggtgctgggcccagagatatatcacaatctcttttgtgggaaaagacaaggtaaaagaagagactcacatcaaatagttgatgggtctagagatatgttacaatctttctgtgggcagagtctaggcaggagactcagtcactgtagtcctgggcacagcactatgtaaaaatgctttattttggaagagccaaggcagaagaatatcacctgtctgttagcctagcaatgtcacaacatcccctgcaaaccaaaccttgaaagaagagtagagtaacctcagctaggtgctggtcccaattatttgtcaaaatccttcttttgagcagaaattggtagaagaggattatcaaaacacaaagttgattggtgcatagatatgtcacagaaaacctagtaggcagggccaggccagagagttacatcacctgggtatcagactcagctacatgtcaaaatggcccatatgggcagggcacaggcaggagagtcacataacctgaatgtggtgccaagtgatatgtgacagtgctgcctgtgggcagcatgaaggcagaagagactcacatcacctgggtgcaaggccaagcaatatgtcacaatgctcccttttggcaatgctaaggcaggagcatgcagctacatcacctaattgctgctttcaatgaaattttataatttcagctctgggctgggcccagggagtagagttaaatcagtcacatgacaggcagaatctatgtcacaatcacacctgcaggaatgtccaggtatgagattaacaatcccatatgtatctaggttcgaggtgtaagattcaatagctcatgtatgttgggcctacgtaaagagtcacaatctagatggtagactaatctgtccatgagacccttaattcctcgtgtggactgtatctccttaatgaagtcacagcctcagagttgtgttgaatctgagagtcacaaacccacctgtgaatgagatccaggtatgatagtcaattttctaacttttgactgcctccaagtctgagattcagaagctcaatcattggctgttttcatgagacagaatgacaatctttactgttgactgggtgtgcatatgagtggcacagtctcacctgtgtgctgggctctgttggaactctttctgcaccacctgaggactttgtagagtgtgcataaaagtcacagtctgctctgagacctttctgctagtatagacccatgattatatctttgaccctaagttcaggtataagcatagttgtcagggtccagattagagagtcctcactctctagtcggcagggtctagattggagaatcttcacctgcctatgcactgcatttattaatgacaatttattaattgtggccaaatgttaatatatgacagtaacaaatcgaactttgaactgggtccacctgtgagattcaggagcttaccagttggcttttgccatgtgtgagggtgacaatcctaacagttggcagtttctgcactttagaaacaatctcacctgtctgctaagctctgtgaagacactctttgtgccactcaaaaggtttatgaaacacaccaaagattggtaattctttttttttttttttttttttttgagaggaagtctcatctcactctgtcacccaggctggagtgcaatgacatggtcttggctcactgcaacctctgcctccaggtttaagtgattctcctgcctcagcctcttgagtagctaggactacaggtgcatgctaccacacatggctaatttttatattttcagtagagacagagtttcactatgttggccaggctggtctccaactcctgacctcgtgatccacccaccttggcctcccaaagtgctgggattacaggcatgagccacactgcccagtcagattggtaattctttatgacattcatacaaagaggaggcccaagatgttacttttttccctaagctacaatacaagagacactatctcccctattagctgattccaggtatgggaatcatcatagcacctatgagttggaccaggatatttgtcacaatcccaagtataagtagaaaatgagcagaagagtcgcatcacctgggtgctgtatgagggatgtcacaacatttcctgggagcagggcaaggcagaaaggtcacataacctgggggctgagcccagtgatatttcacaatgctccctgtgggaaaagacctgccagaaaagacacatcacctggttactgggcccagcgatatgtcacaatcttctctatgtgcaggatgcaggcagaaaaagtgtcacatcactttggtgatagaggcagacatatgtcacaaggccacctatggacagggcttattcagtagcctctgacccaatcctgtaggtgttgggtccagtgacatgtcacaataccaaaaatattcatggctcagcaaaagaaaagatttacatcacctaggtgctggatccagtgatatgtcacaatcctcttctttggcatggcacaggaagaagtagagagtcacaccacctaggtgttggaccaagccatatgtcacaatacacaataaatgcagggcctatgcaaaagaggagagtcagatctcttaggtgctggaaacagtggtacatcacaatttctcctctgtcagagccacatcacctaggtgcttggtccagtaatatgtcaaaattcccttgagaggtgagcccaggcaagagagtcacatcatttcggtgagaaccccacagatgtgtcactattttccctgtgaatagcgctgaggaagaaaaggatagtcacatcatttaaatgatgggcccagagatagattacaatggctcctgggtacaaaaaccaggcagaataattacatcacctgtgtgctgggcccagtgataagtcactttcccttgtgtgggcatggcttcagcaggagagaagagtcacatcaccaaggttctggttccagagatatgtcacaatctctcctattgacaaaacatgggtaggagaggagagtcaaatgaagcagctgatggaaccagagatatgtcacaatgtccccccgcccctcatagggagagtacaagcaggtacctcccaattctttaggtattgtggtcagggacatgtcacaatacttaaaaaatgcagaacccaggcaataaaacagagtcacatcacctaggtgctaggttcagtgatacgacacaattcctaattcaagagggctcagggaaataaaaagagtcacataaccaaggtgataaaggtaaagatatgtcataatactcctgtgggcagagtccattcaggagagtcacattaccttgatgttggacccagccatatatcacaatgcacagcatatccagggctcaagcagggaagaaaaatcacatcgtctagttgctgggtttgatgatatgtcacaatcacttgtttttgcagaacccagacagaaaagaagagtcacatctcctagttcatggatgcagagataagccaaaaggctccttgtgggcaggacccaggcacaaggctctcatgccctaggtgtttgtctcagccatacgtcacattaccaaatatatgcagggcccaggcaaacaaggtgagtcataacaccttggtactaagtttaatgatatgttacaatccccacttttggcagggccaggacgcacacacacacacacacacaaacaaaggcacatcacataggtgattaaaaaaaaaagatatgtcataatatccctgtaagcagggctcatgcataagagtctcatcacctaggttttagacccagagatttgtcacaatacacaatttatgcaagactcagacacaagaggaaagtcacgtaacctaggtgctgggtccagtgatacattagaatctctccttgggtagagtccaagcagtagaaaagagttacattacctgggtacttgctccaggaatatgtcacaatacctcctgaggaaagagtccagaaaggggagtcacatcacctaattgaggggcccaaagatatatttcccagtgctccttgcaggtagagctggggataatcaaaagagccacataacccaggggctgagcccagctatatgtcacaactaccctaggtgcaagtctctggtatgagagaagagtcacattacataggtactgggccaagtaatatgtcacaatctccactgtaggaaggtctcaggaaaagagaagagtcacattatctgggtgatgagcacaggaacgtatcacaattaccctagacagaagcgttacatcacctgtgtgtgaggtccagtgataagccactcttccttttgtgcacacggtccaaacaaaagatgaaagtcacatcacctaggtgctgggcttccagaattgtctcaatccctcctatggtcaaagccaatttaagaaacaagaattacattagctgctctgcctatggagcagccattttttttgtttctttgtttctttacttctctaataaacttgctttcattttactgcatgggctcaccctgacttcttggggtctggattaaaagcccttttcagtaacagctttctggcaaactataaagggactatactgaggagaaaactgaaccaaaggaagtaaactgcagcaccaattagccaacttggggtaactagtggagtacattttaccagggtaaaaaatgggattgggttagaggcccaacatagaagagttacagtctctcctaagaaatactgggttaaagacctctcttaataaaaagcttgaggcccaagttaggaaggttcaagtcctttctaagatttagggggttggccgggcacggtggctcacgtctataatcccagcactttgggagactgaggcaggtggataacctgaggtcagaagttccagaccagcctggtcaatatatagtgcaatcctgtctctactaaaaataatttaaaaaaagcctggcgtggaagagacacctgtaatcccagctactcccaaggctgaggcaggagaattgcttgaacccaggagacggaggttacagtgagccaagattgtgccattgcactccagcctgggcgacagagcaagatgaggctctgtctctaaataaataaataaataagtaaataaataaagtacagctgtcctaggactttttgtcacccacagacaattgttgtcttgattcgatcctcttcaagaggtgatttatggtccgctatggaactttgccaggtatttttaaatgcaggtttctgataactttggagactgcaacattagaacagaggaaaaattttcaggactctcatggagagctgaaatgttaatgaatatcaagcagaaaaggagtttatggcataaactgaaataatagaagacaaaaataatagtttttggcttttttcttaaaatgctgcaaatcctttttttttgtttttcagagtcaaaatatttatagctatttacagtttttaacaactggggaaggtatacttctgtaaaaaaaatttggagcatacttgtttttcgctacctgatttctccagaatgtagaaacctattggtatttttaatttatggaaatatagctatttgcatatgtgccataagcatgttttcttttgcaacagggcacaattggagacactggtaatttcaccagactttggctggaatggggtgctttccttgaagaaatcatactgaatttgtagagtcaatataagccttatgggaaacctggcctcctgctatgtctacacagtccctgtgcagggttcctgacccatggtaagtaaggaatgtcatttcttttttttttttttagacagagtttccttctatcacccagcctggggtacaatggtgtgatttcaactcactgcaacctctgcttcccaggttcaagtgatcctcctgcctcagctgcctgagtaactgagactacaggtgcatgctaccacaaccagctaatattagtatttcatgtaaagatgggttttcaccacgttgagcaggctggtctcgaactcctgacctcaggtgatcaactcaccttggcctcccacagtgctgggattacaagtgtgagccaccatgcctggccaggaatgtctctttctgacagaatcaggagcctgaagttatcttgggaccccaagaagagagaaactcacccaactcataggtatttgatggtacaaacccatggctgggcttggcttttaaaaagtcttttctgatattcctttaatggaacatagttacatcaaagccaatttttaaaacatatgtgaaaaataattatttatgctgcactttatacaaataatcaggccaagtataagactaaagctttttatgcaagtaaatcagttttaccatgatttgtctttagtagaaatggaagacaggagagagaaaaaaattatgtttcaagaactatagtacacccgttattagacactagtctcatttgttgtttttgagtattttccctgctatttagactaattctgcttattcctgtgaacacaccagtgatctctgactgcagctctaaagaaacaagagagatgggtaatataaaaatccagatcaggggccaggcacggtggctcatgcctgtaatcccagcactttcggaggccgaggtgggtggatcacgaggtcaggagttcgagaccagcctggccaacatggtgaaactctgtctctactaaaaatacaaaaataagctgggagtggtggcacatgcctgtaatcccagctactcaggaggctaaggcaggagaattgcttgaacccggcaggcggagttgcagtgagtcgagattgtgctactgcactccagccttgccaacagagtgagactccatctcaataaataaataaataaatccggatcactattctaactgtgaacacatattggaatcaggtagtaaacccatatcagctttgttccaacatctgcccttatttagtttacttgggacaattttacttattttgcttgactgttgtggattgtattgttgttgtgctctttgtgtagaaatgcaggataagcttgctgaatgtttttcttaaatagaacacttaattttgcagataccatcttttgttaagaactccagagttataaatggcccttgtcatactaatgctttctcatctggccaggcatggtggttcacgcctgtaatcctagtactttgggaggccaagagaggtggatctcctgaggtcaggagttcaagaccagcttggccaacatggtgaaaccccgtctctacaaaattagccaggcatggtggcaggtacctgtaatcccagcttctcaagaggctgaggtgagagaatcgcttgaacccaggaggctgaagctgcagtgagccgagatcgcaccactgcattccagcctaggcaacagagtgaaactgtctcaaaaaaaaaaaaaaatgaaaaagaaaaagaagagtcaaatcacctaggtgctgggcccagagatacttcatagcccctcactaggcacagccgaagcagtagaaaaattcacataacctaggtgctgggtacagcagtatgtcccaataccccttgaaagaagggtgagccagagagtaacatcaccgttgagggaccaaaaggtatgttacaatgccttctgtaggcagaggacagggtggaggattacatcaccttcatgttggactcagcaatatgtcacaatggcccatgtgggcagaacacaggcaggagagtcacataacctaagtgcgaggagccacaatatgtcaaagttgtctctatgggcagaaccaagacattgactaagtgctgggtgcagcaagatgtcactacccagtctgtgggctgagcctaggcaggagcgtaaaagttctcaagtgctaggctgaggtatatgtcacaatcacagctgcaggaagatccagagatgagattaaccatcctgcacacatcttggttctaggtatgagaggcaccacctcctgtatgttgggtctaagtgtataacccacaatctcaacagtttagagaatccatccataagagcctcaatacctcctacagactgtgtccctttactggagtcaaagcctcacagatatgctggatcttggtcttagtgtcaccaacccacctgtgaaccgaatccatgtatgaatcaattttccatcttcaactttctttgcatgtgagattcagaacctcaagagtgagctgtgttcatgtggaagaatgacaatatttactgccagctgggtatacatatatgagtgtcataatctcacctctataccatgctctgttatgacaccctttgtatcacaaaggtctcagagcacattaaagtcacacacacacacattaaagtcacagtatgctctgagacctttgtgcatctacagactcatgatcctacctgtggccccaaacccaggaataagagtcaacatctctccattgaatacatccaggtagaaaggatctaacttgccagaattagaaatgagtcaccatcccaactgtagctggatgttcacatatgacagtcacaatccaaactgtgggctgtgtcaatgtgtgaaattcaggacctctccaatgggctctgtccatctgtgagggcgacagtcttaacagttggtggtatgtgcatataagaaacacagtctcacctgtttagtgtgccctgtaatgacactttctgtaccattcaagggctttatataatatgtaaaagaatagtagtgctttatgaccttaatacatagagaagactcataatctctctcattttcctaagtctagttatgggagacagtatctcttctattggctggtttgaggtataagagcaattaatgaacctgtgagctggataaaatatatatcacaatcttacctgtcggtaggaagtgagcagcagattcacatcatgtaggttttcggcaaagatatgtcacaatctttcctgaggtcagaaaccacgcagaagtcatctcacctaggtgctcagccacagatatattacaatcccctcttaaagcagagtacaggcagcagagtcatttcacctgggtgctgagcccagtgatatgtcaaaatgctctctgtgggcacagccttggcaggagagacacatcatctggtgactgggtccagcaatacattacaacattttctgtgggcaggatgcaggcaaaagaagagagtcacatctcttaggtgatggaggaagagacatcttacaaggcccctcatgggcagggcccaggctggagcctcccatcctaaaggaatgatgcccagctatatataacaatacccaagatatgcagtgcccagggaaaacagaagagtagcatcacttaagtgctgggtttagtgatgtgtcaaaatcccccattttgtcagggcccaagcagaagagaagagtcatatcacctaggtgatgaatgaacagatatgttttaatacctctgtaggcagggcccaaacagatttgcatcacaaaagtgtttggtccaggcaggagaggaaagtcacgtcacctaggtgttaagcccagtgacatgtcacaatctcttcttgggcagagaccacgaagcagaggaaagtcacttcccctgggttctagagccagcaaaatgtcacaatgccctctgtgaaaagtgctaaggcaaaagtatagtctcacaccacctagatgctgggttcagtgatatgacacaatttcacctgtaggacctaggcagaagggtcaaatcactcagttgctgggaagagctgtatgatacaatcacacatgcaagatggtctaagaatgagattaatgatcccatacatgatctggttcaaggtacgagagtcaatacctactgtatgttgtgtctaattacacgagtcaccatctcaaaggtgaactggatctgtgtattaaatcctcaatccctcccatgaactgtgttccctcagtggagtcagaggctcacaggtgtgctgaatcttggtctgagagtcaccaacccacccgttgacgagatccatgtatgtgattcaatttttcaactttcagctgcctttggatgtgaggttcagagcctcaaaagtgggctgggttcatgtgggaaaatgacaatctttactattgtcagggtgcgcacaggagtgtcataatctcacctgtgtgcttggtccttttaggacactctctgtactatcctagggctttatatggtttgcatgagagccacaatccagcttgagattttcatgctggtataaacctatgattgtatctgtgtccctaggcccagttatgagagtcaacatctctccaattttctgggttcagataggacagccctcactttcttatgagctgcatttaaaaatgttttcctatcccaaatctggatggatggtcacatatgacagtcacaattccaactgtggactgcatccatgtgtgggattcacaattgcggtctgtccatctgtgagggtcacaattttaacaggtgcttggttgtccatacatgcaagtcaatctcatctgtgtgctgggctctgtgatgacacactgtgtacaatccaaaggctttataccataggtgagagtgtggtaatcccctctgaccttcataaaaataggaaacccagaatcttatccattttcctaagcctagctatgagagacagcatatcaactgttgtctggtttaagatatgagagtcgtcatctcacctgcgacatgggacatgtaacctgtgagtaggtagtgagcaggagagtcacatcaactgggtgcttggccagagatttgtacaatattccctgatggaagggaccaggcaggagaggaacatcacctgggtgctgagcccagtggcatgtcacaatgctccctgtgggcaaggttcaggcaaaagaaacacatcatctggtcagtaggcccagcaatatgttacaatcttctctataagcagggtgcaggtagaagaggacagtcacatctcacaggtaatagatgcagagatatgtcacaaggccttctgtgagcagggcccatgcttatgcctcccatcccctatgtgttgagtccagtgatatgatacaatacccaaatatgcagggcccaggcaaaataggaatgtcacctcaactaggttctgggtccagtgaattgctacaatctccttttttctttggcagtgcccaggcagaagagaagaggcaaataacctaggggatgaatgaaaaaatattttatagtacccctgtggacagagcccatacagaagagtcatattaacgagctgatggacccagatatatgtcacaatacatgacgtaggattggcccaaacatgagagtcacatcatctacatgctgggactagtgatacatcacaatctctctttgaacagagagtaagcagtggaggagagtcacatcacctatgcgctgcgtttagcaatgtgtcacaataccctctgaggggagagcccaggcagtattgttacatcacctgggtgctaggtcagggatatgtcacaatcttccctgaatgtggggaccagacaggtgagtcacatcacctgggtgctcagccagtgatatgttacaatgtccttctaaaagcagggcacagtcggtataatcacattacctagtttctggaagcagcaatatgtcacagtgctccccggtttgctaggcccaggctggagagacacatgacctggttgttgcacccagtgttatgtcacaatcttacctgaaggcagggtgcaggcagaggagagacacatcccctaggtgatagatgcaaagaaatatcaaaaagccctctgtagtcagggccaaggcaaaagtctctcatctcctaggttttggacccagcaatatgtcacaataacaaaattatgcaaggcccaggtaaaagaggagagtcacaccattaagtgctctgtccagtgataagtcactatccttctttttgtcaggacccgggcagaagaggggagtcacatcacctagataactaacaacatgatatgtgataatgcccctgtgggcagggcccatgcaggaaactcacatgacctagacattgtacccagccatgtcacaatagcaacgtatgtacagcccagggaggagaggagcatcacataacctaggcccagtgatacatcacaatttcttattgggcagagcccaagcagtagagaagagtcatatcacctagtttctgggtgtgacaacataaaacactaccccctgagacgaggatcaggcaagagagtcacatcacctaggtgatgggctcagatatgttataacgtccccaggtgagcagggctaaggaagaagaggaaagtcacataaactagggtcagggccaagctatatgtcacagtcactccagtggggatcacccaggcatgagaagagaatcacatcacataggagctgggcccagcaatatgtagcaatctccactgtgaacaagtctgaaaataagaaggttcacatcaactaggtgatgaactcagaaatatgtgaaaatgatttctgtcggcaaagaccaggcagaaaaattacatcatgtgtgctgggcttagtgataagtcattatcccttctgtgggcatggtccaagcagaagaaaaaagccacattacctaggtgctgggcccagagtttggcacaatatcttctatggagaaagctggccgggtgcagtggctcacacaccagtaatcccagcactttgggaggtcgaggcaggtggatcatgaggtcaggagtttgagaccagcctggccaacatggtgaaactccgtctctactaaaaatacaaaaattagccaggcatagtggcgggcgcctgtaatcccagctactcaggaggctgaggcaggagaatcatttgaaactggaaggcggagcttgcagtgaaccgaggtagcaccactgcactccagcctgggtgaaagagcaagactttcaaaagaaaaaaaaaaaagaaaaaaagaaaaaagaaagcctaggcaagaaagaagtcatcaaatagttcataggcccagaggtacatcgcaatgccccttgttaatggggtccaggtagaagactcacatcaacctgctagtgggatcagcaatatgtcacaacgctttttgagtgcagggccaaggcaaaagaggaacatcaccttgaagttgggcccagtgatatgtcacaatgttccccgtgaacaaaacctagaaagaagagtcacatcatctaggtgctggggctagcaatctctttcaatactccctgtaagcaggaacccagcaggaaaagagagtcacatcacctgtgtgatgggcacagagatatgtcacaatactttctgtaggcaggacctaggcaagagagttatatgacatggacattagacccaacaatatgtcataatggcccatgtgggcaaggcacaggcaggagagtcacataacctggttatggttcccctatgttagctgcagtaatatgtcacagtgctccctgtggggagcaccaaggcaggagaataaatttacatcacctagatcctgggttcagcgatgtgttacaatccaatctgtgggctgagcccaggcaggagagtgaaaaaactcaggtgctggacagaggcgtatgtcacaatcacagctgcaagaaggtccataaatgagattaaccatcctggaaccatgttatggttccaggtatgagaattaacacctcctttatgttgcatttatgttcaggactcacaatctcaactgtggacttgatctgtgtatgagaccttccatccatcctctagactgtgtctccttagtggactcacggtttctcaagtctcaggggtgctgaatcttggtctgagagttaccagcttacttgtacactggattcaaggatgaaagtcaatttttcaacttttgaaactttcattggttttgagattcagaatctcaacagtgggctgtgctcctgtggaaggatgacagttattactgtcagctgggtctgcatgtgagtgtcacaatctcacctgtgtgctgagatctgttaggacataatctgtcctatttgagggctttatactttatgcataagaattgctggccaggcacagtggctcaagcctgtagtctcagtactttgggagggtgaggcaggtgaatcacctcagtttgtgagttcaagaccagcctgaccaacatggagaaaccccatctctactaaaaatacaaaattagctgggtgtggtggcacatgcctgtaatcccagttacttaggatgaggcaggagaatcacttgaacccaggatgcagatgttgtggtgaactgagattgcaccattgcactccagcctgggaaaaaacagcgaaactccatctcaaaaaaaaaaaaaaaaagttacaatctggtctgagaactttatgctggtatggacccatgatcatacctgtggctctaagctcagctatgagagccaacatgtctctagttggctgagtctagataagagatttcttaccgcctatgagctgcaggaagctcatagccattgagccatatgtgaatatctagccatttcaactctggctggatattcacatatgacagtcacaatttcaaatgtggactgaatccacttatgagattaagaatctcagcagtgagcattgtctatgttggggcgggggttccaatcctaagtgttgctgtgttgtgcatatgagaaacacaacctcaactgtgtgccaggctctgtgatgacactctctgtaccatccaagaactttacacaatatgcaagtgaatgccaattctgcaaggtatttataaaaagaagacccagaaactcgtctgtttgccaaagccctgcaaagagacacagactctctgctactggctggttaaatgtattgcacctctgagctaaaccaaggtaaatgtgacaataccatcagggatatgtcacaatcttgcatgaggccagagatcaggcagtggagttgcatctcctgggtgttggacccagcaacatatcacagtgctttctgtgggttgagcccaggcaggagagacacatcacctagttgctaggcccagtactatgtcacaatcttctctatgggaagggtgcaggaaggggaaccacatagtctaggtgatggacgaagagatatttcacaaggactcatgtgagcagggcccaggcagtactctcccattccttagctgttgagcccagcagtatctcacaatattcaaaatatgtggggcccaggtaaaagaaaaatatcacattacctagctattggcccagcaatacaccacaaatttctccctgggcagaacctaagcagtagaggagtgtcacatcccctagtttctgggtccagcaatatgtcacagagcatggcccaggcaaaaaagtaacattacttaggtgaagagatgtcacaatgtcttctgtgggtagggctaagagagaagaaaagtgtcacataacctaggtggtggtgccagcgatatgtcacaatcaccccaaaagttctggaccaagtgatatgtcacaatcttctctgtgtacagtttacaggaagaaaaagggagtcacataatctaggtgatgggcttagaaacatgtcaatatgacccctgtgggcagggaccacacagaataatcacctcacctgtgtgctagatacaccgataaggtatcttggttctgtgggcttgatcgtgtgctaagaagagggtcacatcacctaggttttggtcccagagatatgtcacaattttgtctatggtcaaagccgaggtaagagaggagagtcacatgaaatagttgatgaagtcagaaatatgtatcaatgccctctgagaacagggcccaggcaggagactcacatcaccttgctgctgggcccagcaatatgtcacaatgtcttctgaaagtacgacgaagccaacaggttaatgtcatctcggtgttgggcaaggtaaaatgtcaacatctcccttgcaggcagaacttagaaagatgagaaaagtcacatcagctaggtgatggacccagcaacaggtagcaatcttcccctttgagcagagagcacacaggaaaacagagtcacatcacctgggtgatgggtgcagagatgcatcaccatgtccgaggtaggcatggctgaggctgaagagttacatcacatcggtgttaaactcagcagtatgtcacagtagcccatgtgggcagagaacaagtaggagaatgacataagctgggtttgtggcccaggaatatgtcatggtgtcccctgtgggcagtaccagaaaaggagagacttacatcacttggatgtaaggcccagtgatatgtcacaatgccccctgtaggcagcatcaaggcaggagtatggagtcacatcacctatgtgctgggttcagcaatgtgtcacaattgcaactatggactgggcccaggcaggagagtcaaattacttaagtactgagcagaggcatatgtcacaatcacacctgcagggtggtttagaaattagattaacaatttcacttatgtcccaggtctaaatttgagtcaacacctcctgtatgttgggtctaagtacaagagtcacaatctcaatggtgcacttgatttgtttgtgagagtctcaatttctcctgcagactgaaggcttactggagccacagacttacaggtgtgttgaatagatgtctgagcgtcaccaactcacctttgaaccaaatccacatgtgagtcaattttccaacttttgactgttttcacaaggaaaatttgggacctcaagagtgggctgtgatcatgtggaaaggtgacaatttttgctgttggctgggtgtaaatgtgagcctcacaatcttacctgtgtactaggctctgctaagactctctcagtaccatctgagagctttctacagtattaacgagtgttgcaaaccactctgtgaccttcatgatggtaaggactcgtgattgtacctgtggttctaagcccaggtatgagagtcaacatctctataattggctggttccagataaaagagttctcacctgctgtggagctaggttaaaaatgagtcaccatctcaagtgcagccagatgttcaacgatgacagttacaatttcaactgtagactgcatcctcatgtgagattcaagaccttaccagtaggctctgtgcatgtgtcaggtgacaatcctaatagatgatgcggtgtgcatacaagaaatgcaatgtcacctgtgtgctgggccctgtgatgacactctctgtaccacctgaagggtttatatgacatgcaagagagtggtaatccactatgaccttcatacaaggaggagactgagaatcttacatatttccctaagcctagctttgaaagacagtatgttccctatttgttgatttgatatatgagagttatcatctcacctgtgagctgaacaaatcccacctgtgcatagacagtgagcaagagagtcacatcattttggtgctaggccagagatatatcaaaatcttttctcatggcagaaactaggaagaagagtcacgtcacctgggtgcttggccagggatatgttacattcctgttctgaaaggagggcacaggcagcagagtcacagaatgtgggtgctgtgcccagtgatatgtcacaacgctccctgtgaacaggacccaggaaaagaaaacacatcaacctgttgctgggccaaatgttatgtcacaatctttcctgttggcaggatgcaggcagcagaagagagtcacatctcctaggtgatgaatgcagagatatgtcatgaggcttttgagaatggtagggctaacaccctgtttacagggaacagacaggtgcctcccatcttctaggtgtttggtctagtcatatgtcacactactcaaaatatgtggggcctctgcaacatacaagagtcacgttaactatgtgctaggtccagggatatgtcatcatcccacattttggcagggacatgacagagaagaaggacatatcacctaaaccataaatgtaaaaatatatcatagccaggcacagtggcttatgcctgtaattccagcactttgggaggctgaggtgggcggatcacttgaggccaggagctcaagaccagcctggcttacatggcaaaaccccatctctactaaaaatacaaaaaaattagctgagcatggtggtacacgcctgtaatcccagctattccggaggctgaggcacgagaatcacttcaatccaggaggcccgatgattaggttcaaggccaaatagcaaaatatgtttgcatttaatctattttctctctatataaacactgcaggtcaagagtatgcacagatatgaagacttagagttttcttctcctccggacctatcatcctttgctccctttctgatctctggaaggaaggtgggccaaaggtggccagcagttgtctacttgtggttaatttattcctgctgccctctgctctttctatggccgccatcttttccatcctccaaactgaagagagatgttgttaggaagaggcccttccttcacactggcagaataaatttattcaggccctttacccacccaacatcagagctgcacttcacgtgtggctcctgagtgcctggaatgtggctgggtctacactgtgatgtgctggaaaggcaaaaaacagacttagtagcctgtgtgcggtggctcacgcctgtaatcccagcactttgggaggccgaggcaggtggatcacttgaggtcgggagttccagaccagcctgaccaacatggagaaaccccgtctctactaaaaatacaaaaattagccgggcatggtggcagatgcctgtaatcccagctactcaggaggccgaggcaggagactcacttgaacccaggaggcagagaacacactttgtgccattgcactccagcctgggcaacaaaagcgaaactccatctcaaaaaaaaataaaaaaaaaaaaacaaaaaaaacaaaaaaaaacagacttagttccaatgatatagttctaactatatacatgctacattaataattacacattgctcatatagtaatattttggatatattgggttactgaaattgttacaatcagtttgacctatttcttctttctttttaaagtttggctactagaaaatttaaaattcacatttggctcacattctatttcagaagattgcctcctttttttttttttttttttgacggagcttagtttcgcttttggtgcccaggctggagttcaaagcgatctcggctcactgcaactcctgcctcccgggttcacctgtctcggcctccccagtagctgggattacaggcacccgccaccatgccccgctaatttttgtatttttagtagagacggagtttcatcgtattggtcaggctggtctccaactcctgacctcaggtgatccgccggcctcggcctcccaaagtgctgggattacaggcgtgagccaccgcacccggccatgattgcctccttcttaaaatctcaggctgcctgatcaaaaaaccagaagccaggaaggtcaggaaagctgaaattttaaaatagttgttattagattatttttgtttgtgaataacaatatagtgtatttttttcttttctttttttttttgagacagagtctcactctgtggcccaggctggagtgcagtggcgcgatctcggcttactgcaatctccgcctcctgggttcaagcgattctcctgcctcagcctccggagtagctgggactacaggcgtgagccaccgcgcccggccatattatgtattatgtataaacgcatatgaccttacacacaaggttaaatgcaaatacctttgggttgggcctggctcagctcagggaggaaaacctgcctgaaaaggctggagcttaggctttcactctttcttcattcagccgagcatctgatcacgtctcctgtcactcagggcctaaaggggcgaggccttaaacgttatccagtcagggacgctgggctggaaaccgtccaatcagacacgaagctggagcggacagggtggcttccgggtttggcgggtactttgtctctcgctctagcccgagctgcaggtctcgtcttccctggtctgtgtcctcttctcctaggggcccagcctctgtggccctgtgacctgcaggtattgggagatccccagctaagacgccaggtcctcctggaagcctagaaatggtgagagtgctgggtccgacatcctgggagaggggaagggggtggttggaacctgtgggaagtcgctgtggcgggactcaggcctccttgcagtcagccctaccatctgcgcccgagttttccttggccagctcggcctcggtccccctcagccataagatggcggctgcgctgacagccgggaccccgggcgtcctgtctcttccctgcgcagtgactgtgccctggcctggatccctctctcggcagctctgcacccgcagcgccgagtctccccaggttgtgcagggaccacaggagagtcgtcaggggagaatcctgactcggggtgcggggttcatgaatgggaagagctttggtctgtggggttctgagtctctcttttctcttattaaaaatatacagaagtcaccgcaaaaatattaaagaatttaattaaagagtgattcaaaaatccgggcgcggtggcacacgcctgtaatcccagcactttgggaggccgaggcaggcggatcacgaggtcaggagattgagaccattctggccaatatggtgaaaccccgcctctactaaaaatacaaaaattagcgggcgtggtggcatgtgcctataatcccagctactcaggaggctgaggcaggagaatcgcttgaaccaggaagtcagaggttgcagtgagccgagatggcgccactgcactccagcctgaagacagagcgagactccgtctcaaaaaaaaaaaaaaaaaaaaaaaaaaaattgtaaagtacccagctatggtttgtcatttgtcgtccatagcaggggcttgaagagaagactttaataacatgagataaagaaaaccaaattcagtaattggttagatgcagttacatagtttgttaatttgtactatcaaggtggacatttccttgttatgtaatcagaggttaaatggtagtgtatagttggctacgcctcaattttgtttcccccaatttagtaatttataaaaacatgcgtttgaggccggcgctgtggctcacgcttgtaatccgagcactttgggaggcccaggcgggcggatcacttgaggtcgggagttcgagaccagccttaccaacatggagaaactccgcctctactaacaatacaaaattagcggggcgtggtagtgcatgcctgtaatcccagctactccggaggctgaggcaggagaatcgcttgaacccaggaggtggaggttgcagtgagccgagattgtgccattgcactccagcctgggcaacaagagtgaaactccatctcaaaaaaaacaaaacaaaacaaaaaccatgcatttgagttaaatttctttaaagtagaaatccagggactagagccacctcagtctagttgcctgccacttaattattttcacaagccacaggggactaattttccgctgatttgtttttctttttttttttttttaagaaggagtttcactctgtcacccaggctggagtgcaggggcgagatttctgctcattgcaacctccgcctcccaggttcaagctattctcctgtctcatcctccggagtagctgggattacaggcacccaccaccacacctggctagttattgtatttttagtagagatgaggtttcatgtgggctaggctggtctcgaactcctaacctcaggtgatccgcctgccttggcctcccaaagtgctgggattacaggagtgagccgcgtccggccttttccgctgaattttttacatgtgtcccaagcagagtctcaagttttaccctcctcccccttcatcatttcttcagcctaactctggattgcaaaaatagtaaataataaaatactaaattttcagtttcttctgacattcccaaatgccagttttccctaattcacattatcaattattcatcctttagtttacattttttataccatattttaatcattttttgacaaagcattggatggcactttaaaaagatttgttttctgtttgtaaatactttccatgggaagaaagcaaagtataattccctgacactgtagtgtaaaaaaaattttgttcctctttgcttttatcttgtataggcacagagatcttatcagaatgtttttgggtcaaagtttccctttggaagctgtgaggtgagatgtcttcacccaccctttagttttgttcttggtcttgggcttcagtatttcctggggataaaccaagatacccaccatggctatatctgctagagtatctagtggatatcagctactgggtcttttttttttttttttttttcttcttatagcacaacctgagttatggagtgtagcctattaagaaagaaggtggctgccccagggctgagaggagtctcctgttgtatttctttttcgaagatattaagattgtcttcacccaactcagcttccatttcttagagacacattgctgttaagccaatcagatgctggtaaaaaacacagaaataatttctgccccctggattctctaagtgggcagagaaatagtgaaataaaaatagtgaaacatttgtgaaagaaaaaatagtattttttggtttctttgagacagagtcttgctctgttgccgaggctggagtgcagtgacaccatcttggctcactgcaacctatgccacctaggttcaaggattctcctgcctcagcctcccaagtagctgggattaaaggtgcccaccccaacgtttggctaatttttgtgtttttagtagatacagggtttcgccatgttggccaggctggtcttgaacacctgacctctggtgatccactcacctcggactcccaaagtgctggaattacaggcgtgagccaccgtgcctggccaaaaaacagtatttcaaaagacaaaaatttaaaaaaagaaaactgaacccagttagatggtataagagcttacaaaataaaatgatcctgggccactcagtggggcatagtgcagtttctcctgagagagtggttattgagcacttatgagagcaggatggggtgggagaatctctcaagcgattagatggccttacttgacatatgagtcagacacatttgtttcttaatcagcattgctactccctcggtttgtcaccttgaaaagaattgttttcggccgggcgcggtggctcacgcctgtaatcccagcactttgggaggccaaggcgggaggatcattaggtcaggagatcgagaccacggtgaaaccccgtctctactaaaaaatacaaaaaaattagccgggcgatgtagcaggcgcctgtagtcccagctactcgggaggctgaggcaggagaatggcgtgaacccgggaggcggagcttgcagtgagccgagatcgcaccactgcactccagcctgggcgacagagcgagactccgtctcaaaaaaaaaaaaaaaaagaaaagaattgttttcacttatcttgacctccgattttttaagtataagttgcattttattagtagggctttaaaggtaagaaaatatttacaaagggacgggggagcactgtctcgtgcctgtaatcttagcactttgggaggccgaggtgggtggatcacctgaactcaggagtttgagactaacctgggcaacacggtgaaactccgtgaaagcccgccactatgctggctaatttttgtatttttagtagagatgggttttcaccatgttgtccaggctggtctggaactcctgacctcaagtaatccgcctgcctcagcatctcaaaggtctgggattacaggcatgagccaccatacctagccctcatttacctatttcttttccagagtgaatttagaaatttttttttttttttttgagacggagtctccctctcacccaggctggagtgcagtggcacaatcttggctcactgcaagctccgcctcccaggttcacacccttctcctgcctcggcctcccgagtagctgggactacaggcacccgctaccatgtccggctaatttttttttgtatttttagtagagacggggtttcaccatgttagccaggatggtctcaatctcctgacctcgtgatccgcccacctcggcctcccaaaatgctgggattacaggtgtaagccaccgcgcccggccgaatttagaaattttttcaagtgtgttttattatggctgggtggtttcaaacgcaattccaaggcttagcttttagaatgctaccaaggaaaagaatagaaaaaaatctctgtattttggctgtagaaaatgaatacatttccacaagaaaatatggtagataattgatgagttacatggattcataaaagcatcagtttctttttttgcagggaaaacttgtgatagtgaatatctctgttctatattctgttattttgatttctgagtttaatgttaaattttatgagattaaacttgttacctcctagaagtgttcacatattactaattatttacaacatgatttttaatgaaactaatacaataatacatttattctctgaaaggaatactttaacttttcttattgggtatgaaatataagcaccttaattttttttccttatatgagtactatgtttgataattttgctagattttttaaacacttagtttcaaaaaccaagtgagtaactctgtcatagaaattaaaacttgagcccagtgactccaagctaaggctaatattgagcctgcaaaaaaggttattaaaggcccagctaattctttctggggagccgcccctgcagatgtcccagccatggaagaagcctttatcctgagagaagctacagagccctggaaagccggggatccacaggcagatgcagttaaggttaaaatagaaggggtctcagaaggtcttactgaagatgaagttgttattgttctgagatagtttctagactttgtaaaatataagcaaagttagatttatgtttaaaaaaaattccacaggagtattgcaacaggaggaagcactaacaataatatctttaaggactgcaaagcttaggctgacagggactgactttcataaggaggagcaaacagattaaaaagaaagtgtgagggaaatgggaaattgaggatgaaataactagatttgagatcttttgagatggagtctcactgtgtcgcccaggctggagtgcaatggtgtgatctcagctcactgcaacctctgcttcctgggttcaagcgattctcctgcctcagcctcctgaatagctgggattacaggcaccagccatcatgtctggctaaattttttgtatttttgtagagacgggggtttcaccatgttggccaggctggtcttgaactcctgacctcaggtgatccacccacctcggcctcccaaagtgctgggattacaggcataagccaccgcgcctagccaaattcagctgatttttatatgagaaaaagaagaaaatgtgcagagtctgtgtctggctatgtgatgggcaaaaaaaagagccccatctaagttataatggaaagggtgtttctttccatgaactgttcctggagcacacaaaggatggagaattttattaatcacaactatttacctggattacctatgtgcttcatctttccccacctattttttttttgtcctatacatttattccattttgctttttctgggttgtatcttttatgattaactggtcaacataactatgttgttttgcttgttagtggctctatcaaatcattgaacttgagggaggttatgggagtccttgatttttaaacagtagctcaggagcatagatgggttcattgggtttgttcctgacatctgcagtaaagagaatactgtggtactgagccctgaatcagggtctgtgctgaatgggtggtgtcagaattcaaattttagacaatgagttgatgttggagaatcttggtattcagcaaactctacagatttggtgccagaagaaagataccacagaggcctggcctgaaatgaaactctgggaggctctgcttttctgtctgtcatagtgcccattgttttgtgattctaggtctcctcccagggtgagagaggactgaaaacttaaaggaaagaagctcggatagcagattccctttttccacagctgtcagcacaggatttctacccagtcacaaagacacccactagacattgaggtgtctacaccactcccagggctagacaccaccctcaggaatttcaccacagcatttttatcctaatgtttttttttgccaaaaacccacaagtgtctacaagtctcctggcatatcctcacccctagacactgaatctgcagcagcaacctgttttctccaccaacctagggttctggaccacctgttcgtaatctcatctgcctgcatgaacccagaaataaattagagtcacacctgggccactatctgtagcacaaaccagtcctatcacctacattgcactctctcaaactaactcatggatttttttccttttaacttttattttttgttcctgagtacacatgcaggtttgttatataggtaaaattgtgtcatgggggtttggtgtgcagattatattgtcactgagatactaaactttgcaccaaacaggtattttttctgatcttttttgtcctcccatcatccaccatcaacttgccctcagtatctattgttctctttgtgtctatgcattcttatcatttagctcttacttataaatggtaacatgtatttatttattattattttttgagactctgggattacatgcgcctgccaccacaccagctaatttttgtatttttggagggacggggtttcaccatgttggccaggctggtctcgaactcctgacctgaggtgatccacccacctcggcctcccaaagtgctgggattactgtctctacattagttttctaagaatactggtctctagctccatccacgttgctacaaaggacatgattttgtttcttttcttttttttttttttttaatggccacgtagtattccatgatgcttatgtaccatattttgtttttattaaatcttttattttattttatttatatttgaagaaagggtcttactctttcacccaggctgaagtggagtggtgtgatctaggttcaatgaagcctcaatctcctgagcttaagcaatcctcctacctcagccccccaagtagctgggactatagtcacatgccaccacacccactaatttttttctttttctattttttgtagacatgaggttttgccatattgctcaggctgctgtcaaactcctgagctctggcaatccaccagctttggcctcccaaagtgttggattagaggcatgagtcaccatacttgcccataccatattttctttatccagtctaccatggataggcatttaggttgattccatgtctttgccattgtgaatagtgctgcaatgaacatgcatgtgcatgtgtcatgatggaataatttatatttctttgggtatgtacccaattaagaggttgctaggtcaaatggaaatttgtttttacttacatgagacatcactacattgcttttcacaatggttgaactaattcacactcccaccagcagtgtataagcattccttttacaaccttatcagcatctgtgattttttttaactttcgtataatatccattcagatttgtgtgagatgatgcctcattgtggtttttgtttgcatttctctaatgattagtgatgagcatttttttatatccttgttaaccacatgtatgtctgttttgaaaagtatctgttgatgtcttttgcctactttttcttttttttttttttttccgagatggagtcttgctctgtcgtcagactggagtgcagtgggatgatctcggctctctgcaacctccgcctcccaggttcaagcaattctcctgcctcagcctcctgagtagctgggattacaggtgcccaccaccacgcccggctaatttttgtatttttagtagagatggagtttcaccatattggccaggctggtctcgaactcctgacctcagccaatctgcccgccttggctttggttgggattataggcgtgagccacagtgcctggcctaatcaatcttgagttgatttttatatatggtgtaagaaaggggtctagtttcagtcttctacatagtgctagctagttattccagcaaaatttattaaataaggaatttttctcaaattcctcttgtcagtttgtcaaagatcagatggttgtaggtgtgcagaataaattttggggctctttaatctgttgttttggtctctgagcctgtttttgtaccagtaccatgctgctttttttactgtagccctgtggtttaaagtttggtaatataaggcctccagctctgttccttttgtgtaggattgccttggctatttgggctcttttttttttgttccatatgaattttaaaatggattcttttggttctgttaagaatgtttttggtagtttgataggaatagtattagatctgtagatttctttgggcagtatgcccattttaatgatattgatcttttctatccatgagcataaaatgattttccatttgtttttcatctctgacttatttaagcaatgtttttttgttttgttttgttttttatttttgtcatagagatctttcacccctctggttagctgtatttctacataattatttttctgtggcagttgtgaatgagattttgtttttgatttggcttttagctcagatattgttgatgtacatgggtgctactggtttttgtacatttattttgtatcctgaaacttttctgcagttgtttgtcagtttaaagagcttttctgtcacgactatagtcttttctagatacagaatcatgttgtctgcacacaaagatcgtttgacaacctctcttcccatttggatgccttttttttttttctcacctgattgctgtggctaggacttccaatctatgttgaataggagtggtgagagaagacattcttgtcttgtgccattttttaaagagaaatgcttccagcttgtgtccattccattcagtatgttggctgtgggtctgtcataaataattcattattttgaagtatgtaccttcaatgcctaattggttgagggcttttaacataaacgatgttaaattttgttgaaagctttttttttttgttgcatctattgagataatcttgcagtttttgtctttcattatgtttatgtaataaatcacattgatttgtttatgatgaaccaatcttacatcccagagataaagcctacttgattatagtggattagctttttgatatgctgttggctgttggatttgattacacagtattttgctgaggattttttttttttttttgagacagagacttgctctgctgcccaggctagagtgcagtggcatggtgttgcctcactgcaacctctgcctcctgggttcaagtgattctcctgactcagcctcctgagtagctaggattgcaggcacccaccactgcgcctgcttttttttttttttttttttgagacggagtctcgctctgttgcccagtctggagtgcagtggcgaattttttttgtatttttcgtagagacggggtttcaccaaattgaccaggctggtcttgaactcttgaccttgtgatctacctgcctcggcctcccaaagtgctgggattacaggtgtgagccactgcgcccagctttgctaaggatttttacatcaatgtttgtgaaggatattggcctgaagttttctttctttctttttttttttttttgagacagagtttcctccttgttgcccaggctggagtacaatggtgcaatctcggcttaccacaacctccacctcctgggttcaagcaattctcctgcctcagcctttcaagtagctgggattacaggcatgcgccaccacacccggataattttgtatttttagtagagatggggtttctccatgttggtcaggctggtcttgaactcccgacctcaggtgagctgcccgccttggcctccaaagagctattacaggtgtgagcctccactcctggccagccactgcacccggcttacctgaagttttctttttccattttatctttgctgggttttagtatcacaatgattctgttctaatataatgagttggggaagattttcttctcattttttttggaatacttttagcggaaatggtactagctctttgttcatcttaaagatttcagctgcaaatttctctggtcctcagaactttttggatggtaggctatatattactaatccaattttggagcttgttatttgtctattcagggcttcgttttcttttgtgtggagtcttggcaggatatatttgtgttcagtcttggcaggatgtatttgtccaggactttatttattactattagatttcttgtttgtgtgcatagagatgtgcatagtagacttcagtagttatttgtatttttgtggggtcagtaataatgtccctttgtcatttctaattgtgtttatttggctcttgtttcttcattaatctagccagtagtatatcttatcaattttttttcaaagatttaactcctggatttcttgatcttttgtatagttttacatgtctaagtctccttcagttcagagctgcttttggttattttttgcattctgctagcttagaattggtttgctcttgcttctcatactttattttgtgatattaggtcactaaattaagatctttctaacatttcgatgtgagcatttagtgttataaatttccttcttaccactgccttagctgtgttgcagcaattctggtatgctgtatctttattctcagttgtttcaaacaacttcttgatttctgtcttaatttcattatttgcccaaaagtcatttaaatgcgggttgtttaattttcatataattgtatgttttcaagtggttttctttgtagttgaattatattttcaacaatctgttgtctccatgtgtggttggtataatgtagggatttttgtatttgctgagtattgttttatttctaattgtgtggtaaatgttagagtttgtttcacatggtgattagaataatgtatattatgttgtttttacatagagttctgtagatatccattaggactatttggtcaagtgtcaagtttacatactgttatctttgtttattttctgtctcaaggatctgtctaatagtttctgtggggtgttgtagtctcctactgttgtgtcagaattaaagtctcttcataggtctctaagaacttgctttattcatgtgtacccatggaatttttataacacatttctctcttctgcttttttccccataagcattatttcaagtgcacaaagtgtgcccaaggttgccccttagatgcctgaatccaatgtctgctgaaattgagatgtccaagaattcaagaacacgtccagaaaacctggctgttgtagaaaaaaatataaattagaaatgaaaagctttattcttctaccttgaaataagcacttagcatcttaaagcatttaagatgatatgtacatttatctttgttattttgaaatatacataaattatattaacagctaagtaaaccttttgtcattattttttactcaaggttgtcattagctaggacttcagattcattgctttgtttttgctttggcaaagttttttcctttcatttttagtcttttaaagtcgacagttttgtttatatcaaagcttattttaaaaacacgcaaaagtggagcacaaaaataggattaaatttagccatacagaatgataaagactaaaagatactgagtagttttttttaacagaaaactgattgtccaaggtgattatctaatattttcaggctgaagtactcacactgcaaaagaaagcagttcagtatataaactgaacagtgaagtctttagttgtactttggtttccgtttattacttcagaacaattagcatagttatgtgtagtgtttgtaggcaacctgcgtttatatactttaaaaactattttcagccaggcatggtggctcacacctgtaattccagcactttgggaggccgaggtgggcagatcacgaggtcaggagttggagaccagcctggccaacatggcgaaaccccgtttctactaaaaatacaaaaattagacgggtgtggtggcacgcgcctatagtcccagctgttccggaggctgaggcaggagaatcgcttgaacccaggaagcagaggttgcggtgagcccagaccacgccattgcactccagcctgggcgaaagaacgagactccgcctcaaaaaaaaaaaaaagtattttctacaatagtatgaatataaggccacaaaatttactttcaatgaatcagatgggccttttaatattgttatttatacttttgaaatataaagtgttttaactgaattatgataacagactttttttgttttgttttgttttttcaatggagtttcactcttgttgcccaggctggagtgcaatggcatgatctcagctcaccacaacctctgcttcccaggttcaagcgattctcctgcctcagcctttcaagtagctgggattacaagcacccaccaccatgcacagtgaatttttgtatttttagtagagatgggatttcaccatgttggtcaggctggtctcgaactcccgacctcaggtgatccacccacctcggccttccaaagtgctgggattacaggcatgaaccatggtgcccagcgattacagacatttttaaaaaattttacatttattatgactagtacattaaaattatatatacttagatatttatatctaatgttcaaaaaatttactacaaaattgttacagtagatattagtctgaaatgcttatttatctaatagggataactctaggtaagcataattttagtgtcttgtatttcactaacttggaatgctgctattacaggacaaacacaggtgacatggccatccaaaaaccgtaatagctctttagttaactatgttgcaagctcaaatatattctactatatgaacagagagggattccaattcttcatcaaaaagtgctggtggaagttgtcagatgtatttcaacatagatcccccattcaatggctaggagatgagagagcaacagagatgaaagagaaaccttatgaaattctgctgaaaatatgcacactttctttataatgctcatgtttctcatgctgagagtagctgtgcactctggatgcttagaaattcttttcaggggaatattttctggctatttcgataaatcttatgtctaatttgagtttttcttaagatgcttttaacttctttatttctctcaataaaatcttgctcatttgagagctgtttttctctcaaatgctttgggtgtctgttttagaagccttatgcgtatcccgtggtgtctttgaatgaggtgggctgtcacagggatgactcttggagtgatctctaccgagactcatactgcaaatccagcagtattttttcatgtcaccattataaattggcactgaggctgaaacacttcttccattccctttattgtgaaggtgcagttctacccaggaggcctgcaggctctcctcctgcagctcaggcttcactctctgatgtggcactggagtgctactgtggcagtttgggttcacataagatgtgagctgccagctgtgagccctgtgctgtgggctgtgcctcagtggcagatggtaggagtcaagagaggacactggtgaccaggggagggcaagcaggagtgctctagcccagtctcagggagtagagagccattattttaaaatgtaaatagccaaaatgatagcatcctaatcaaccatttttgtagaagagtgagagcctaccttcagcaggcaccaggcttaagtggcaaaactgccttttgtcatgaagatgtgataaggtttattttggcattgaatataaccatgtagcatatatggaaggccttttcaattatcaagtgaatttagaatgaattatgtatagcatggtgttgtaaatttttctacttatggactaattatgatgaacatctttctgtctttgcagtctttgagcagattgaccatgatgcacttcacattctaggttaattgtgtaataaaacagttttctttctgttctatcattgtgtttctctggggctgtagaaagtttttcttttcgttatatattccagacactgtctagaattaccagacatgatataaacacataaggtgccagccaagctttactctagaggggactttccctctcaggcttccagtcacctcacaattatgctacatagtatgtgctgtctcctaaatatgcaggaagaattgtgtatctgcctatttggtatctataggccactacagtcacttctagagaagctagaccagatttctacaaacttcacagggcagcaatcaacattttacctctttcgttgactcttgtatcttcagacctgaaactgattcacagaacatggagctcagaaacccaatcagagtaatatgtgcgcactgaatagacacgtagacatgagaatctccactttcttgtatctcctcttgctaaaatgtccacaaatatgcaggtaacacctgctgctactccacccatccagagcctaaatctgcagctccaaattctgaatgtaggtcttaagttttggaaaataaaaaaaaacgtttatctgaggaatacaagtccttttagttgtcaaacacagagagacattaaaatgagagctcaggttgggtgcagtggctcacacctgtaatcccagcactttgggaggctgaggcaggtggatcacgaggtcaggagttcaagaccagcctggccaacatggtgaaaccctgtctctgctaaaaatacaaaaattagctgggcatggtggtgggcgcctgtaatcccagctacttgggatgctgaggcagagaattgcttgaacctgggaggcgaaggttgcagtgacccgagatcgcgccactgcactccagcctgggtgacagagcgagactctatctcaaaaaaaataaaaaataaaaaataaatgagaaacacaattatgtctcccccccgcttgagctatgtattcatctcctgaaaccattcacaattgccacaagtagcatcaatttaactaataatgtgacactgaacactataacttaagctgtaaaccttactgatgtatatccaatcaatagtcaatgttatttctataaataaataagaaaggtaggtatagttgtggttatgactctagacactttgttgccttgatctctcactcccaaaatcgtttgttactaacaaacatttttgtaccatcccactctctgtccctctttttttttttttttttttgcctttacaaatccacttgtaactgctgattatcaaagtgtagattccaggcaacttgaatctttgctcccaggttacagtcctcaaagatggaacaaataaactgtctacttatatctgtgttgcctcgggtttttctttttaggcagacatattacttaggatgtgctagaacagcctctaggagaacatctctctttgattgtactccacttgctgtaacacccaagaatgcagagccagtttgatctgaccaagaatctgcacataagagctgatctctgcctgagattcacaagacagggccaggttttagattaagaaggtaatgaaaaccaacaggaggaatttctgcattgtgagatgtcaacatagacatcttaaagcccccctttgatagtgtggctctttgagcttttcaagtcttgtccagtgacctgctgcagttacatgagaggatcctggtgtaaacagaatctgatagcaacatcttaggagtgagagatcaaggctacaaagtatccagagccatgactgcaactatacctactcctaaaatgtgatactggagtagaacatttttgtccttcctcttacccaaaagctagcaaatcaggacaggtgatccaggttctggagctttaccagggcagttccattttctatttagaatcagcctaaatctcttctgtctggcttacaattgggccgtcagcacacggtcactgggaatcctctcagaatcacctaggtgtctttgagacatttgaggatttccagagcagaattgtcaggctgacgagtggttaactctgcttctgtctcagtgtaagagaaatgggtcatccttccctcattcaagaggtgtctttggttggtacccagatgacagtttcttcaattgctggtacttgggaggaaaagaagtagttctggagattcgaacagttaaactaaatgcttccatctcatatggccattagaataatagatgtagcagtcatggtccctaccatccatgaacttttagtccagactagcaactggataaacgatgaattaagcatcatatggttgatataataaatagatttgtgcaaagaaacttggggtttatttgggccgtaagtaacccaaataaaaaataaacaatattaggccgggcgtggtggcttacgcctgtaatcccagcactttgggaggccgaggtgggtggatcacgaggtcaggagttcgagaccagcctggccaacatggtgaaaccccatctctactaaaaaaaataaaaaattagctgggcgtggtggtgggcgcctgtaatcccagctacttgggaggctgaagcaggagaattgcctgaacccaggaggcggaggttgcagtgagccaagattgagtgattgagtgattgcattccagcctggacatcagggcaagactctgtcttaaaaacaaaaaaacaatattgttgtgacttctgatgtcatcacctgaagggatgtttatggacagaagaattgttattatttttatttcttttattttgctaagaatacttatttatcttctaataaaattattctagatatccttaagatatttgtttaaatggattattagtatatattaggaaattgacagggcagtagctaaaaaagattaaagttacatgaactctgggatttaagtttttcttaggtaagcttaggaaacagaactggaagtaccccagtggcacagagaacaaattctacataggctccactccctgctccagttctgttcagttcctacttgggggctttatttagtcctgtccccaccctggagtcttgcctcagataattgatttaataagatcagagttttggttggtgaagcctgctgtctttctagaagtggtgctcacagttttctgaaatccaaaagcagataaatgggaataataaagtatgtattttagggtctttttaaattttttattaaaaccagtgcttgcagagacattccatttagcaacttgttttctaatcttacaaatcagtagttgctccacaagtcacaaaaaattaaatataaacacaataaaaattcctctaaactacattaaatttttcctttatccctctcatctatctatttagctttattctatacattttataaaaaattaatgacagagaaactataaaaattaaaatgctgtgccctttatctaaatcctgggaattattaaacacttagtaccaattcccaagggtgttatgaagattatgtcacataatgtgttattcccagcacagtgctccgtaacatcctcttgagcacatagagcacaatgtttaataaacattccatcagtacacttgtacatgttatttaaacgcagacttattcagacatggctgttttctgtttcctctgtatactctacagagccagcaaagaatatgatactttaggatggagagtggttgtcttcatttgccctagaagtatttgtgttgtgacaagagtgctgagtataagggactctgtgctgtgcctgctttctctaactaatgctgatcatgagcccaggggagcaacatcaacattgacaggggacttgtttaaaacattcattttggacccttttcaaacctgcagcatcatattacatagagtgggcccaaaattactaagtgatttgtaagctcattaaagcttgagattaaatgcttagctaagtggttataagcccagacctctaattaggattacatggccaatttgcagaaaaatccttacttcagcttttcctacaggttttgtttattgttttaggtggaaacatatatgttgttttggttaagtacctcgtataattccaatgtgaggccagaatcaacaatgaagggttcaaggcattcatgagagttaaggtagaaacctttgcactaaagggtggtcacagggcatgttctgtttgggtttgggagagacaaggcagtgtggcccatattaccattactgtagcagaaattgctggtgtctgtggcagaggagggcatctgaggacagaaaagaagaaacttatatttttattttcatagagaagctcattgttcctgaatctctactagtataaaggacagaaatggatggaatgtttctgcaggtcttggtcctgccagtgggtgtggtggtagcaggtaaatgggtggtgctgacacctttaaaggcatattctcgagatgcaggtgtaatttgtgcagaaaatttcatctgagcaagaattccagaggagaaggaggaaaaaatggcttttttttttcaactaaacatgtctcatatcaagagctgtgtccactctgccttctgaaatgccatgcatttttacgtgcaaacctttacttctctacttgtttttcctccctaatgagtttgttttaactactttaaaaaattcttgtaatagtcaagggtctctgaaaaatatgttttttcccatataccagagccttctacatcatggctccttctatgccacgcagaattttcttcatggatttataatctactgtattaaaaatgttccctttgtgtctgggaaggtgtgaatactcaagattcctattggaagaagaaaggggttcttaaaaaagatggaaaacttgtaatgttgaggttccatctgtgttcttcattaactctatagagagcaggattaaggaagtgtttatttaaggaggatggcatttattacccagaaagtcctgaaaaaaaatgaggaaatacttgctctctagggtgctaaagaaagactacttaaaatcactattaaaaattacagaacatgagagatatctgtgtcttgaacttggtataaaactgatggttctttatggttgaattcggactacgatttacttctgggagaaaatgtcacagtggtgatgctgtgtccttcttttgtgcatcagcacatcataaaaatttgtcctagtgcaagtaacattaatgattcacttggttaaggaggtctacaaatttttttactagaaagctagttatttttcttttcattataaattatttttatgcagcggatgtgcataaaccatcacattttatctggtagctgcccctctttcttaggttttatttgcatatatctgtctttggcaagtaaaaactgtcatctttttctttttacagtccagcaatactaggaaaaacacaggctcttttacttagtggatgtttgacaaaatattcttcttgggccaaaaacattggcattactggtgaacttgttagaaatatagaaactcaaaacaaaacaaaaaaaattcagaaacagactttctataagtcagaaccagttctctactctctcatttgaccttgagacattaaaaattctgccctggctgcttggtaaatgtgtatgggggtgtgttttttagagtcagagaatacattagagaatatttctgtgttaaaaaaatattttcttggataattttggtcactccaataaggcagaacctgttctctctgctctttaattacaccttgagtgacattaaaaattctgtccctgaccacttggtaaatatatgtgtgtctgtgtttgtgtgtttttcagggaccactgacaattagggatgtgactgtagaattctctctggaggagtggcattgcctggacactgcacagcagaatttatatagggatgtgatgttagagaactacagaaacctggtcttcctgggtgaggataacttcagtactcaattcctaatatactccaaaggctttattttttatttatttttttttttgtagaatgttttttggtaatttggtaatttttgataattatgttttgcataaatgagtttcatatccctgttttcaagaaaatcataaggatttgtcagtgtagaaaaaaaaatttcttcaagaggtttcaccttgaactgaactttccacattgctgagctgatctgtatccctcactctagaatagtggtaattccagaaatttagtggtgtaaaatattgttgcccacaccttaaaatctaattgctaccaccaatttttttattcagtagtactgggtagtgaattaagaatctacaaatatacagtattttctaaatatttagaaatttctgttataaattagtattttggcataaatgtattagaatattatattacattctctttattgagcacattactaagttggtaattggagaatatgagcaagatgcgtgttacttatttttaaaaaacaggtattgctgtctctaagccagacctgatcacctgtctggagcaaggaaaagagccctgtaatatgaagagacatgagatggtagccaaacccccaggtaggtgagagtgaaagccagtacaacaggtgaaacagatgagagatccacaggtcaaggagaaagcaagtccttaaaatgtcatttcggaagctgtattccaagggatatagtttctggaagcctgagtttgcattttttttttctttgctctcacatagggacatttctgtcttatgcttttaaattctctaaagattctactttcctttcagtcattttccttcaagtttacagtgagagccaaagtcctcatggcatataagagactgcatagtctgactgctttttcattgtttttaggggcatacaaatatctgcataattttcaaaaattctatgttaagctatttcttaagttctctttttgcattgtgcctgacatgaatagagtagtggtttctgttccattgaattttttaatttttctgcacatttcatcctttttctttagtatatttttgaaagatagtttggaattataaaatatgatgtcattctgctttttttttcctgaagattgctttggctattcaaagcttattgtagtttcatgtaatctttagccttgtattttccgttactgtgaaaaaaacttgccactggaatttttacagggagcttattgaacctatatttattgaatctatattctttcaactcatagacatgaaacattttcaaatttatttttgtcttctctatttcttttcctagctatcttatatctttcagtgtaaagagtttttatctccttggtcaaatttgttctcagaaatttatttatttatttatttattttttgagatggaggttcactcttcttgcccagactgaagtgcaatggtgcagtctcagctcaccgtaaactcctcctcccgggttcaagcgattctcttgcctcagcctttcaagtagcagggattacaggcactcgccaccatgcctggctaatttttgtatttttagtagacatggggtttcaccatgttggccaggctggtctcgaactcctgacctcagatgatccgcccttgtcagccccccaaagtgttgggtttacaggcgtgagcaccgcgcccggccagaaatttattattttaatgctattgtaaataagatttttttttgtctattttaccagatagtttgttttaagtgtatggaaccataacttgtattttaattttatattttgctaatttacggagtttatttattaacttaggttttaatgcgctgcttatggttttctataaaaaagatgtaatctacaaacagcaaatttttacttatttgtcttcagtttcaatggctttttgaaaactgttttgactaattattctgccatatacttcagtgctatgttaaaatagaagcattgacaaggtgcacaatataattttgcatttggtgtctgtgaatttgaaggagcaaacacctcttcaagtttctataaactagtttcaggaggtaaagatcttcttccattgggcccccagggtgatgggattccctctgggtttgtgatggagaggggttgtagcttggtcacaagattgctgggtctgcactagggtccacctttagttggcttgttacaaagggcttggatagttgtaattcccatattatttttggacagattggatatccttcaagactttgctctgtagggcagacactagggcaggtttttgcagtagggtctgtatataatgtaccttaaatcgggatgtaaatgagtatggcttttgctgagtaccacagaggatttcctcgggtcacactgtgttggtttctaggtaaagagaactggccataaactgtggcccaggaagctggaactgagactttgaactgcttcaggcaccacattaaaagccagggtctgcaggcctgcctgcatggctgtaaacgggtgtcttcctccaggcctgtgaaaggacagaacctctcccagactgcggctgaaaggattttgaaataattacagagtaaattcagaattctcagtgggaccaagtagcgttggccatttcctgtcctgtagccaagaccaggggtcctgtagtttgccaccaaaatgagagcctgctttctgaagagaacacccctcaatctttggctttagcagaatttcacaacttcatccctggactttaaagatctcttaaaggcatttattttggagatggggtcttgctacataacccaggctggtcttgaaatcttggcctgaagcaattctccaaccttaatataccatgtagctgtcattacaggtttgagccatgaggcctggtactctcataaaggtatttttgtcagggatggccaacaaattttcttgctgtggaggaatagacaaatagggcaccttttatttctctatcttattaatgtcaccctttctataagtttttaatttctaatttctatttcaaatgtgcctgtaattttagattcagacatttaggagcaataagctagaatttacatgttatgtttgaagtaaattaggtaattagtaggcattccatatttactaatatagttacttacaaatttaagtttgctacaggcaaaaaggaattatatattttcacccattttctctagcctatatctaaacaataacataatttattcattaagtatttgttttatataatagactccaaccatattctgctatatatatattaaattatatatacaaaataaataataaatacatatattaattacatatatattttagcaatgtaaggctatttcttgcttctaaagttggattacagcagtttcattttgtgaaagaatagcatacaattaaaacataaaaattatctctagtttattttaaatgcttatttattgtttctcattaaaatcttctgtttatgattattctgcattatctctaaaattttactgccacacagtgcctgtcaatgattcgaaatacctgccttccatgagtacacagttacagtcaaatactgtagttatctagacaattttttttaatggtacatcagtgttgcataccacattatatgagtaaacattttacttattgttgttttgcagttccatattagtgtgtttttttcaatgtaggtttcttttgttttttgagacggagtctcgctctgtcacccaggctggagtgcagtggcatgatttcagctcactgcaacctccgcctcccgggttcacgccattctcctgcctcagcctcccgagtagctgggactacaggcgcccgccaccatgcccggctaatttttggtatttttagtagagtcagggtttcaccgtgttagccaggatggtctcgatcacctgacctcatgatccgcctgccttggcctcccaatatgctgggattataggtatgagccaccgcacctgtcctaaaatttaccatctttaatctgtttaagtgtacatttcaggcctaggcatggtggtggctcacatctataataccaggattttgggagaccaagacagaaggattgcttgagcccaaaatgttgagaccagcctgggcagcatataaagtccccctctctccacacacaaaaaatgttttaatagccaggcatgggggtatgcacctgtggtcctagctatttgggagattgagtggggaggattacttgagcctgggagtttgaggctgcagtgagccatagttgtgccactgcaatccagcttgggtgacagagtaagatcctgtttcaaaaaaatggtatacatttcaggcatgttaagtacattcacattgttatacaagagacttccagaaattttccatcttgtaaaactaaaactcaatacccattaaataacaacaacccattttaccctctctccagccctcaacaaacaccgtttctctttgtgtttttatgagtgtgatgacttaaaatatctcatattagtggaattatatagtattcattattttgttactggcttatttcaggtgacataatattctcagtttatcttcaaatgtgacaagattttatgaggctgaataatatttcattgtatttaggtattacatttttcaatgtgtttccaaattaagacatttgggttgcttcagccttttgacttttgtgaatactaatacaataaacatgactgttcaaatacgtcttccaggtcctgtgttgcatattatagatatagattcataaatgagattgctgtattttatggtaattttatttttgattatttgaggtacatttataacattttaaaataatggctacgctcctgattttcaccaacaatcgacatgggtttcattttcactgcatcatcaacagatttggtgtttttttaaaaaattatagtggccattctaggccaggcacggtggctcatgcttgtaatcctagcactttgggaggccaaggtgggcggatcacaagggcaggagtttgagaccggactggccaatatggtgaaaccccgtctctactaaaaaaaaaaaaattagctgggcgtggtggcgggcgcctgtagtcccagctactcaggaggctgaagcaggagaattgcttgtacccgggaaatgaaggttgcagtgaactgagatctcgccactgcactccagcctgggcaacagagggagactccaactaaaaaaaaaaaaaaaaaaaaaattatagtggccattccaatgagtgtgaggtgattttgttttttgtgatttttatgcaattctctacaaaatagttattttgcattttcttttaaatgcattttcttatttgtgtatatttttgataagaattttgttcaattatttgaccatttctaaatcaacttattcaactgtattgtttagttttaagacttgtttatatattctgaatattaactcctatcatgtgatttgcaaatattttcacacattttttatgaggcattgtcactctattgaatattttatttgagtgcaaaaattttgaaggatagtgcagttaaatttttctgttattttctttgttgctgatgcatttaatgttgtatctaaaaaagtgttgctaagacaagcgtcatgtttttcttctatatttctaaaaaattggttaattattttttatgtctgggtattttatttaaaatatttttcatatatggttcaaggaaataatccagctttatcactgttgacacccagttttctttctttctttttttttttttttttgagacggagttttgctcttgttgcccaggctggagtgcaatggtgcaatctctgctcactgcagcctccacctcccgggttcaagtgattctcctgcctcagcctctctagtagctgggattacaggcatgtgccaccacgccctgctaattttgtatttttagtagagacggggtttctccatgttggtcaggctggtctcaaactcctgacctcaggtgatctacctgccttggcctcccaaaatgctgggattacaggcgtgagccaccaccgcacctggctggtatccagttttcaacattaatttttgaagagattatcttttctctattgtgtgctcatggcaactttgtggaagatcatttgatcttttaaaggggggttcatttcttcactcgtattctgttctttcatctgtttatgtgtctttgtttcagtaccacatcgtttttattttagcttctagtatgttttgaaattagaaagtataatgcctccttgttctttttcatgggtttctggctatagttgtaatcaaggtttaaacttttacacaagatttcttgtattggttggtctgttctcatgctactaataagaacatacccaagactgggtaatttataaagaaagaggtttaattggcacacacttccacatggctggggaggcttcacaatcatggcacaaggcaaaggaggagcaagtcatgtcttacatggtggaagacaagagggcgttagcaaaggaactcccctctataaacccatcagatctcctggaacttattcactatcacaagaacagcacaggaaagacccactttcatgatttaattacctctccctgtctctctcatgacacatgggaattgtgggagctacaattcaagatgagatttgggtggggacacagccaaaccatattatttctgttaaaaactgtgctattgagattgttataatgattgtattaaatttgttcacaactgtaggttgtattgacacctttgaaaaattaaatttttggcccctgagcaagaatatgttgaagaattttatatatttagttttatatacttttggacttgccagttttgcttttaattcctagttttattcaattgtggtcagaaaacgcacagtgtataattttggtatacttaaatgtatttattgttgtttttagacaggatcttactctgtcacctaggctggagtgcagtggcatgattttggctcactgtcacctcaacctcctgggctcaagtgatcctttcacctcagcatccctagtagctgggactatagacatgcattaccacgtctggctaatttttttattatttgtaggaacagggtctcactatgttgcccagcctggtctcaaacttctggccccaagagagcctctcactttgttcttccaaagtgttggggttataggcatgaggacttcatgctgccatgtaattctcaatgttgaatgtaagaccagtgggaggtgtttggtttgtgaggaaaaattccttgtgcatgggttggcaccatcctctttgtaatcaaaattttacattctattaattcaaaagagagctggctcattaaaagaacctggctccttcaccttacacttgctgtctgttaccatgtggtatgtccagttaccagttactcttggccttccaccatgattgtaagctttttgagaccctcaccagaagcagatgttggcacacacttcttgtacagtctgccgaactgtgagccaaatctttttttttttaaataaattatctactatcaggcttcctgtgtattcaaaataatttatacagtctataatgttttctaagttctctgttttattattgctattttatctgaattttctatttattattgaaaatgaggtcttgatgtctacaactatgttgctatgtatttcctgcttcaatttgttgatatttgctttatatattttggagccctgatattatatatacatatacatatagctagataagtattttattaaatacattaattatattatatatctatatagttggttttttttttttgagatagagtcttgctttgttgcccaggctggagtgcagtggcacgatctcagctcactgcaacctccatctcccaggttcaaacaattcttccacctcagcctcccgagttgctgggactacaaggcacgtgccaccatgctcggctaatttttgtatttttagtagagtcggggtttcaccatgttaaccagcattgtctcgaactcctgacctcgtcatccacctgcctcggcctcccaaagttctgggattaaaggcatgagccaccatgcccggtcctatatagatatctatatgtatacatatatatgttatatatacacgtatctgtaggtatacgtatatatatactcatatacatatggatagataccagttaaattgacccattttaccattatataatatcagtctttgtctcatgctagtacttaggactaccataattatgtctaccataattatgcctacccacccaattataattactatttgcatggaatatagatttttttcattctgttactttcagcctatttaactaaattctaaaatgaatctcttgtatgcagcatattgtatgctgtttttcttaagccaattaggcatttaattttttaaatataatttatttaattttttatttttgagatagattctcactctgtcagccaggctggtttgcagtggtttaatgatggctcacagcagcttcagcctcccaaactcagatgatcctctcatttcagcctctcaagcagctgggttacaagtatgtggcatcacaccctgctagtttttttgtattttttgtagagacacagttttgccgtgttgcccactctggttttgaccttctgagatcaagtgatcagcccaccttggcctcccaaagtcctgggattacatttttaaaaattaaatagtttaattaatttgtatttaaaataattgcttgaagaaatgtttctattaccagttttattgttattgttttatgtgctcttatagatatgttttttctcatttcctattttaccaccttaaattttgcttaattttatagtgacatgccttacttttctatttgtttagcatactttctataaatattatcttcataatcatcttgaaaaatgaagattacataaaacatcttaaggttaaaacaatatattttaatctcataacttcaactgaatacaaatactatacctctacatttttgttattaatattacaaattatatctaataacagatttatgcagatttatattttgtttttcatattctgtagaagaaatttagggattttatgcaccatcattataatagtaaaggattccatgtgtgtctgtatatttacatttaatagagaggtttatatttacatagtcatatgatgctgtgcgaattttatttttcagcataatggactcgtagcatttctttgtttttatatgcaaagtcaccatgttcctcaggatgttcttgaactcctggtcccaagtgatgtgactgcctgggcctcctaaaactgtaagattacaggcatgagccactgtgcctcgccaccatgtagcattttttataggacagtgctagtcgtgatgaacactctcaccttttattttggaaagtgtttatttttatctttttttgaagtaacataatttcaaatcaagtattattggtcaggtatgattttattacctcaaaatttgggaagtacttagtctttttcattttcaagtaaactctgtattactttttccctatagtcttcttccagcattttgttcatgaatatattgatcgacttgatgctgtccaataagtattacattctatgttttaaatttgttttgcaattttatatttttgtattatatattttagaacatgacatctcataccagttaattgtgttttgatttttcagtttatattataattgtgtatgacaatatttagttctgaacaatttaagacagtgtggagcaaaatcaaatatgaatcagccatacagctagtgccaatataattgtctctgtgtttgtttgcctttataaatattatccctgtgtttctttataacttgtatatttgtggtgtaggtttgttgtgaaaggttgtttaatcctgtgtagatgagtagccacaaaaattctcctaatttcaacatcctatttatttgtgaatcttccatatccggtttattcatgaatctatattatttttctgtgaaagaaatacttttggctttgaagataatttaaaaactaccgacagggtgtggtggctcacacctgtaatcccagcagtttgggagggcgacgtgggtggataaccttaggtcagcagtttgagaccagcctggccaaagtggtgaaaccccgtctctactgaaaatacaaaaaaattagccaggcatggtggtgggcgcctgtaatccagctactcaggaagccgagacaggagaattgcttgaacccaggaggtggagattgcagtgagccaagatcgcgccattgcactccagctgggtgacgagtgaaactccatctcgaaaaactaaactcataactaaatttctcttctagctactattgttcatttttacttgtcaaaaacacataataatttataataaaatattttcaaatattctggtttattttttagttatattgacattgttatgcaacataattgctgaagtgtttttatcttgcaaagctaaatctcaatacacattatacaactaccaatttttccagtattatggcacttttgaaacaccactctgttttctcttcctagtggtgtaacttctttatatatctcatacaatctctgtctgtttgtggctggcttatgtcactttgcaaaatatcatcaagatttatctgtgtagttgttagaatattttctgctttttgaaaactgagtgatgtggtccggtgtggtagctcacgcctgtaatcccagcactttgggagaccaaggtgggtggatcacctgaggtcaggagttctagaccagcctggccaacatggtgaaaccccgtctcaactaaaaatacagaaattagctgggtatggtggcaggtgccggtaatcctagctattcggggggccaaggcaggagagttgcttgaacccgggaagcagaggttgcagtgagctgagatcgcgccatcgcactccagcctgggggacaagagcaagacttcatctcaaaaaaaaaaaaaagaaaactgagtgatgttccagtatttttacatttcaaattatatctattgaataatttggtgacagaaattagcattgtttttaactattggctttccgtaacaatgctacaattattatgggtatgtaaatgactctttatatgaccatatatatgaaagtttacgtgttgcattctatttgatttgtctagttttcagcttgatactgataccaaattgttttaattctgtagctttgtaatctgttttgaaataaggaattataatgcctccaacattgtttctttttttttttgaagattgttgggtactttgttgtctcttgcaatagcactcctgagtttgttattgctattttttcaaaagtgcaatgagaaatttgaaaaacattgcattaaatctgtagattacattaaacagtataaacatctatacaatattaattattttaacttttgaaaaagagcatgcttgagtgtatcgtttaatttctatatatttgtgaaattttcagttttttccattgtttcatattcttattccattttgttcatagaaagtaatctataaaattttagggtttttttttttttttgagacaatctcactctgttgcccaggctagggtgcagtggagtgatctcggctaactaactcctgcctcccgggttcaagtgattctcgtgctttagcctgctgagtatctgagattataggcgcatgccaccaggcccagttaattttttatttttggtagagacagggtttcactatgttggccaggctggtttcaaactcctgacctcaggtgatccacccgctttggcctcccaaactgctgggattacaggcatgagtcaccgtgcctggccaaagttttagtttttttttttgttgttgttgtttgtttgttttgagacagagtcctgctctgttgccaggctggagttcagtggcgcgatttctgctcactgcaacctccgcctcctgggtccaagcgattctcctgcctcagcctcccaagtagctgggatcacaggcatgcaccaccacacctggctaattttgtattttcagtagagaccaccacacctggctaattttgtattttcatgttggccaggctggtcttgaactcctgacctcaggtgatccacctgccgtggcctcccaaagtgctgagattacaggtgtgagccacgatgcctggctcaaaattttagttttaaaacacttgttaagatttattttttgacctaaccggtggtctatcaaaaagattgtatgagctattgcaacgggtgtgtttcctgatgttgagaagttttctctatatctgtgttagaaatacttgttttatactgccttcaagtccactgtttccttattaatattctcttgttttattattatcagagaaagtgaggtattgaaatatcctactataattatattgctttctatgtgtttattcaattatgtcagtatttaccttacatatttggaaccctaatgtgagatacacacacacatgcacacacacacacacacacaaacacgcaaacatgagtatatacaaatttttcataggttccccatcaatctattattgcttaatgtcctttgtctttttgagttttgacttcatatacattttatataatatgagtttttgacttaagatatagcttgcgtaatactattttgaccttttctgctctcatttggttaatatttggataaaatgcctacagcaatcttgccactttcaggcttttttaattattagttctaaactgactgttatagaaaggcaagtctggccttgagttttaatgttttttaatgaatccctttatttgaaactagaaagctaattatacctatatgtaagtaattttctaaaagacaaagacttccgttattttattaattattttatttgattcttgtatctttgtccctcattttctccctttctgtcttccattgtgtctgtttcattttagtattgatgtggtttcgcttctttcttattttcttttgggtgtctatacagatattttctttgtggtaccttagggattacataaaacctctaaaagataaagcagtatatatttaatctggtgaaaaatgaacttcagttatatacaaaaatttttcctcattacatctgccctcgactttgttattgatattgctgattatatgttgtatatttattaacagatattcacaataatttctgttcttttatttttctaattttagagcataattataaatgttttctgtcccattatgagaatgataaggaattctatttttgtgtatgtatgtttcccaggaacatgtatttttatatgattatgtgttgatttcttgcatcgtgttattttcagtggaagaaacttttttcagcatctttgatctatataggccatatgcagtgccaatatactgtctcgggatttggttattttagaaggtcttttttttttatttatttggtaggatgtttttgctgatgattattcttttcacctgacagcattttttcttcaggactttgacaatatcacacagttttcttctggcctgcaaaattttcttttgaaaaactcactgtttagtgtgtaactctatgccaataaatgacacatcacttttgtcttgcagttcttgagattgtctcgtctgtgacattttaagttgttcttatatatgtgtttttttaaataaatatcttgtatgtgtatttttgttttttgaacttctttatttttatatcatttttcttttagaattggttaattatctctttgtattatttacctccacaattactgtttttaaaatgcttttaatatttttgccgtttttcttatttttctgattttcagtagttgtctgtgctccttttactcattattattcaacttattttaaatttctaaaatttatacatttttattttataatgattgctttctgaaaatttcatgatttgtttgatggggccatgttgccctaatattttgtacacattgtaatctttgagactgggacatttaaaaaaaaaaaggctacctgtcacaatctttacaatgtagctttatcccggcatagtctaaaaccagttgtcatggctagacattctgggagcctttcaaacatgttcttagagtgtgtctgatctgaaatgttttattttctagtttaaaaagtttatttgcacttcttcctagttatcaatcacttgctacacttgttacctgtctgtggtactgcagtctgtctgctgctgtaacatttacctttggtctcagcagtctcaaattgtcattctaaagtatactattttttttcagcattttatttaatgggagaatgaaaccagtgtcttgaaagacccctaaaagccagacatagaaatgtatgtgccaatatttttcttgtcttttaaatagaaacaaggagttggcaatttacttctaagggcactatgttatactgaggagaaggaagtactgtgttgggttaatataacagatttttctttttcttctatgttgctttttacatcgtgttaacctggggcactttacacacttaactcatttataaattttccaaaaatgtgttttggtcagtatgtttttgttacattttatatgtttttgaataaattagagcctgtggtattttgctatgccatcttccttatgtagtatatacagttttataggttagatttgtaaaaaatatttacctgagtctagtaagtggagtaatttgttgtttttatttcttttagttatgtgttctcatattgctgaagacctttgcccagagcgagacataaaatattttttccaaaaagtcatactgaggagatatgataaatgtgaacatgagaatttacaattaagaaagggctgtaaaagtgtggatgagtgtaaggtgtgcaaaggaggttataatggacttaaccaatgtctgataactacccagagcaaaatgtatcaatgtgataaatatgtaaaagtcttctataagttttcaaattcagatagacataagataagacatactgaaaagaaaacttgcaaatgtaaagaatgtggcaaatcattttgcatgctttcacaactaactcgacataagagaattcatattagagagaattcccacaaatgtgaagaatgtggcaaagcctttaaccagtcctcagctcttactcgacataagatgactcatactggagagaaaccctacaaatgtgaagagtgtggaaaagcttttaaccggtcttcacaccttactcaacataaggtaattcatactagagagaaaccctacaaatgtgaagagtgtggcaaagcctttaaccggtcttcacacattactcaacataagagaattcataatagagagaagcccttcaaatatgatgaatgttgcaaagcctttaagtggtcctcagctcttactacccttactcaacataagagaattcatactggagagaaaccctacaaatgtgaagagtgtggcaaagcctttaaccagtcctcagcccttactcgacataagatgattcatactggagagaaacccttccaatgtgaagagtgtggcaaagcttttaaccggtcttcacaccttactcaacataagataattcatactaaagagaaaccctacaaatgtgaagagtgtggaaaagcctttaaccggtcttcacaccttactaaacataagagaattcatactagagagaaggcctacaaatgtgatgaatattgcaaagcttttaactggtcctcagctcttactacccttactcagcataagataattcatactggagagaaaccctacaaatgtgaagagtgtggcaaagcctttaaccggtcttcataccttattcgacataagataattcatactggagagaaaccctacaaatgtgaagagtgtggcaaagcctttaaccagtcttcacaccttactcaacataaaataattcatactggggagaagccctacaaatgtgaagaatgtggcaaagcctttaaccggtcttcacacctttctcaacataagataattcatactggagagaaaccctacaaatgtgaagaatgtggcaagccttttaatcgtttctcataccttaccgtacataagagaattcatgctggagagaaccccaacaaatatgaagaatgtggcaaagcttgtaaccattcctcaaaccttactaaacataattcataatggagaaaaaccctacaaatgtgaagaatgtgtcaaagcttttaactgttcctcaatccttactaaacataagggaattcataatagagaaaccctacaaatgtgaagaacgtggcctggcttttaacaaatcctcaacatttactaagcataaaataattcatgctggagagaaactcttgaaatgtgatgaatgtggcatagcctcttcccagttctcaactcttactaaacatgagaacacatgtggaagataaagcctacaaatatgaagaatgtgacaaggcctttaaaagttctcaacccttattacacataatttatactggacagaaatcctaaagtgtgaagaatgtcacaaagcccttaataagtcctcaattcttaacagatataagatgtttcatactggagcgaaactacaatcctgaatgatgtcacagtgcttttaacaatacctcaaacttttctaaacataaaaaaaaattatactagtgcgaaactctagaaatataaagaacatgaaaaacttttaaatggttttcacacttgattgcaggtaaaataatttataccggagaaaactccaagtgtgaagaatataacttttaaccagtgttcacaacttattgtacaggaaagcatttatagttgagaaatggtgtacaaatataaagaatgtggaaaagtcattaatatttgctcacatattacacatcagagagttcatacttaataaaagtattataaatacaattactgtcaaatgatctttcagaaatataaacctttaaagtgaagaagagttcattctaaagacaaacattacaaatataaaggggtttgtagtgcttttacttgtatcacagattttattgtacacattttgtactagagaataaccctgaagcagttgctaaaattttgttcagcattaggaaatttatgttggagaagaattcagcaagtgtgattaatttggaaaaacattttttccataactatagcttagaaaatgccagagagctcatactaaaatatacttttgcagatgcaataaatacaaagaaatatttaattcaaattgagtttatataattatcagagaattaacagtagaaatagctaaggcactgacacttcagacattacactaaatcagattgctgagtatagaaaatccaaaactacagttggtaagtaaattaattttatgtaactttaaaatgagtagacatttctttgagaagtcataattaaattcaagtatacttttttgataaaattataaagctttttaaaagtaaataatgatgtaagtcaactctcaaattacttcatgctgtttcttcatttctattgtattcacctgtgaaagcatgtgatcaactattgctgcatcagagatatgagagatactttattaggtgggaattatatacgacctcttctataaaatagtaaggacactgaaatataagatgcataagagtctaagtgaagaggttctttgtggttaacttagtgatgtatgaagtagttgctcatgttatgagagaaaaacatttttaattttagttaaatgtaagttaaaattaaaatagtaccatataatgttagtgattgtacttttatttaataaaatgcagtacattttaaaatttttagattatttgtggacttaatttataattaaatattttcttttaccacgttaagactattgtacgttcaggccgggcacagtagctcacgcctgtaatcccaacactttgggaggctgaggcgggcggatcaattgaggccaggagtttgaaaccagcctggccaacatggtgaaaccctgtctctactgaaaatacaaaaaattagccaggcatggtggtgggtgcctgaaatcccagctatttgggagattgaggcaagagaatcacgtgtacccaggaggcagaggttgcagtgagccaagatcacgacattgcactccagcctaggcaacaagagcaagacttcgtctcaaaaaaaaaaaaaaaaaaaagacttgtgcattcagtggagtattattattccactaactttaacataccccaccttactcaagggtgtaggtaaaatatggtaacaatatgctatttggcaacatagtggaataacacctctagtaatctcttctgccaatggcttcaaattgcaaataagttaaaaaatatttttcccataggttacatttttatcctttttttcttaaatttattctttttaattttgtggttacacagtatgtgtatatatttatgccatatatggcatattttggtacaggcatataatatataatagttacatcaggataaatgaggcatccatcacctctagcatttatcctttttattacaaacaatttgattagtaaaataaaaatattgttattttaaaatattaaaagtactttattttaaaatttgcaattgttctgactacagggtcatttttatggtcataataaaatttatatagaagtataaataaaattgatacatttctaagtactgaataaatatttaaagaatttgttacatatttttctttgaacatgatttatctctgcctgcaaacacatataggcttttagttttgatttacatagagttaaacatatacatatattactctaaagataaaccttaggtgtaagaaaattatgaagtaagtgtgtatgagtatgagtttgtacccatttttggaaggagaaagcaatattggaacaaaacaaattattttaataaggtgacttattagaaaactaaaaacctcgaaaatgttgaaagcaaatctatactctgtgcattgtattgaattcattgctataaaatgttagggcttatagttcagaatctccctatgcacattctctgtttttacttgtctggtactcatgctagacccataatgttcttgttttgtattttatgaagtactcattatgtgagctggtcagggattataagaatgatttttatgaaatttaagagtgcacacaaaataatttttagatgtaattacaaaattagttatatttttatataagttagtttttatataatagttatattgttatattttaacgtttgatttttgttttattggagaaacctgtataaggctaattttctttattgtttctttcactttttataattgacataagtaaatctattgagtgagctaatttgctttggtaagtactagggagacttcataagtcatgaggatgtttttacatataaatgtagcaaacaaatatgacagttcttctgagtaaaacatgctttataataagtcataaatatttttgctggagttagtttgtaacttcaagtcagagatggaaaatagcaatggtgaagaaataacattgattcatcatgtggagaggacattttcaggctgcaaagctgacttgctgaatttaaacacaaattctgctgcttttattttctactgatcttcagttttgtcttacttagtgtattccaactatatatgcatcacagtctttcttcttttactgtgttatgactacagttttctcattgttgtcttcatgccatgtcattttacatggtagtttgtgggttctcatgagaaagttggtatttttaatgcattgaaaaattggttttaactgaagaatttgcttatcaataaaactttcagattagtcaattaagagaatagacatacactgttaacaagtgaaaagattacatcagttagctttttctttgtaaaaaaaaaaagttttattcttgcaaaaagcatggcaaatataaaatttgtaaaaatatttcagaaattagattctaaatagagttaatggtaaatgaacaattttaaatttaattttctatgatatatttatagcacaacttatgtttctatgcagaatctttttttttttctttttttgagacagagtttcactctctctcccaggctggagtgaagtggcccaatgtcggctcactgtgacctccatcccccagattccagcgattctcctacctcagcctcccaagtagctggaattacaccacgcccagctaatttttgtatttttagtagatatggggtttcgccatgttggccaggttagtctcaaactcctgacctcaggtgatccacccgcctcggcctcccaaagtgctgagattataggcgtgagccactgtgactggcagaatcttatatttttaagtgtgaatgttgaatgtggcaaaacagtacaatgacctgtggatctgaaatttggaataatatttattttacatcttgataaaacaatttggagaaattccactcttttttttttttttgagatggagtctcgttccgtcacccaggctggagtgcactggcatgatatcaactcactgccacctcctcctcccaggttcaagcgattctcctgcttcagcctcctgagtagttgggattacaggtgcacaccaccatgcccggctaacttttgtatttttagtagagacggggtttcaccatgttggtcaggctggtctcaaactccggaccttgagatccgcctcggcctcccaaagtactgggattacaggcatgagccactgcgctcagcccatattcttttatatgacttttttttagtaggtacagtttagtctacagatttttactcacctaactgtagccaactccttgatcattggtaagtgactgattagtaattccaaactattgaccggatgcagtggctcatacctgtaatcttagcactttgggaggccaaggcaggtggattgcctgaggccaggagttcgagactagcctggccaacatggtgaaaccctgtctctactgaaaatacaaaaattagctgggcatggtggcgagcgcctgtaatcccagctactcgggaggctgaggcaggagaatcacttgcacctgggaggtggaggttgcagtgagccaagatcgcgccactgcactccagcctgggcaacaagactgaaactccatctcaaaaaaaaaataagtaaatacaattttttaaaaataaaaaaagtaattccagactattttagtcactgtaaaaacttaatattctttaattattaaataggaaaaagtattctgatattagtgtttctgaaactttcagaaagtgtaaaccagtaaaaaaatgatcaggtatatgcagaccataagttttctatttaatcataggctcattctagcttttaatataaaaatttgataaaaggtaaaatgagtggttcttttaaataataagagaaatatcattgttagtagccatttaccaatgtatttttgttaggcttagtaatgagtactttaaaccaaaaatccagttctacatactatctaaaggtataaatagtgatttttaaattccttttagattctactaaagtagaaaattcaaagccaaaatgttacgttggaaatggaaaaaagcattaggcgagagggtgttgggcttaatgattaagattgatacttagtatgaggtggttcctgtttgcatcctagttctgccacttatgagctgtatgacctgaatacagtttgttaacctccgtgtgcttaacccttaagctgtacagtgaggataatagtgcttaaatcttaggatattagtaaaatcagagcaattaatactgataaaggtaccagaagagttcccagcacatcgtgagtgtacaggaaatttatcagctcttgttgattctgttagctcgtgatcaatgttgagcctaaaaagaacgtggccgaatcagtggtttgtaacccatgtttattctaatcagtcagtccggggctataatggtagttggatgtttttaatactatctttggcaaattcccatatattcacatacagcatagttacaaatatctgtggaaagatttcttgttgagtactgctccttagcactccagtaacactagataaataagcacttaaatgcctagtgtttgtcagtgttaaaattaaagaggcaaattgtttcttcatctgcttgtttaataaatttcttattgccaagtatttatgttcatttgttaaacttaaatgtagtttacaaatatgtattcaaatattttttctctaacaagtgaaggaaatcatctacttagacatttagagaaaactttaaacagttgctttagagtctgtttcttagtattacgttatgttgaacattcaaatcaagatattttatttctgaattttgggtccagactattaataatattaaaagtttacctacctacattactaaatgagaaaggcatttgaaatatatatatatataaaatataaatatatatatatatatttcttcatcttataattccaggaaacatatgttttaatttatatatatgtgtttatatatatatatgtatatgttttaatttatgtatgtttcctggcattttaagatgaagaaacactttttctctgacccaatttcttaacgtttatctctttaaaaaaaaaaaaaatgtactggctgggtgtagtggcttacgcctgtaatcccagcactttgggaggcccagatgggcagatcacctgaattcaggagttcgagagcagtctggtcaacgtggtgaaaccctgtctctaccaaaaatccaaaaattagctgggtgtggtcgtgggcacctgtaatgccagctactcgggaggctgagcaggagattcgcttgaatccaggaggcggaggttgcagtgagcaagttcacaccactgtactccagcctgggcaacaagagtgaaactccttctcaaaaataaataagtacaaaaattagccaggcgtggtggcgcacgcctgtagtcccagctactcggaaggctgaggagggagaattgcttcaactcgtgagacggaggttgcagtgagctgagatcacgccactgcactccagcctgggcaacacagtgagactcctctgaaaaaaaaaatagtatttttattggaaaatcagagttttatacattacagtgtacaaagtgatgttctgatatatgtatataaaataagtaaagttacataacgtatcaataacctttttgtggtgagacatctgaaatgtactcctattttgaaataatgcattattgtttactatagttatgctgctgtgcaatagatctcaaaccctatttgcctctgtctatttgaaacgttataccctttaacaaatccctatttccctctcagacccttgccttctagtcaccattatttcactttctacttttttgagttaaactttattagattctgcatataaatgagatcatgcagtgtttgtctttctgtgtcagacttattccctctagcatagtgtcttccaaatttatctatattgtttcaaatggttggatttaccttcttttaaggctgaattgtattccatttaccacatttaaaaaattaaatatatatttatttgttgataaacgtgtgttatgtaaaaatatttgtgttaaagcacatattaatgtaattcagcatatgaatatcttattaatagctaatttgtactgagcactaaccataacattatttatgtgttaatggattttaattctcacagtaacttaatacatctaaacactcatttttaataaaaatcaaaaattgaatcatttatattgttataagattgtatagaatggtacatgaaaaaataatttaagcaaaaaagatattaatatttgcaatacataaaattggaaagcagttaattatttggagatgatatctttgtttacttagataacaaaataaactataagactattttaaaagtctattcaggtgggtaggcaaaattctaagatgatcccaaggattccaggtctgttgcacatctgctgtgcattccttttctcttgagtgtaaaaaaggtgtgactgtggtgagaaatcactcatgaaattaggttactaatatgttgacttggtgttcatcaaaagggagattatctcaatttggctaaactgaattagaggtgcttttaagaggaagagacacatcatagtaaaacactgctgcttgcctggaagtaagtgacttctaggtgggccatgttgtaagctgcttttggtggtcacatggcaggaaatgtttgtatattgtaatcatttctgcttcccacatgttgctttccacaggaagacagaagaattccatgacaagaaaataaagggtgggggggtctcattcatgcaagaaataatcacttctcatttgagatagcattaaggtgacagaaaaaaccacaacatgaccacatcaatgagaggaaaaagacaacacggtcgaaggtgctcactggcattatggagaaacattttgtaagccatagtgaatgatcagcctctgggataccggtagtctactaagaaagctaaactcattctaataaatcagcatatctgcaccattctggttggcccagttttacactatccatttcagaaataccatggagaccagtgggtaccctcctaaaattgaaattataattagaaagcatacctaattatttgttttcataattgaaaagccttgaaaacaatgaatttattaataaggaactgctaattttagaagatcctattatactgtattacaacattgaactttaaacaccttgagtatttcttgaatgcataaacagttacgtagatagtttctcttagattaacatgataaaggtaacagaaaacatttgaaatggaataaaattaaagccacatgttttcaatgtcttggcgtaattgccatgctttttaaaacggccagaaaaataaataaataaaaaacaataaaacagccagttactaccaagaagcaaagacaagattttagctttgctcaatcattacatgattgacctttagaaatctaaaactctggctaaaaaattaggagaaattttttttttaggtaacttcctaggatttctgaggcaacacaagaattctgataggcagaaaaaaagcatactaaatatacacattgctcttctctgatttgctttaacattaaaagattaaaaattgcaaatataagctaaatttagagtatgttaacaaaacatttatttttcagccaagcaaataattatataaaattaatgagtaacagatgccatcatctgccaaaaaatagtatgactagattcagtaagtgtctagccatgaaaatgacagcccaattaaattaagaccctaataggtgcatgtggaaagcatgtgcaaaggtgctgcacctccacttagcaccttcttctgcctctttacagagacaccaatttccctagtgacttctggtgaatactgggaactaagaatgcattgttcagagcgattactgagaacatggttaacacagttttttcatattataataaaattttgtaaatcttactctacctctgaaaggcttttagtaaaagaattgtttatgtatggtactcaatttggattcatagaaaaatttacttttccaggtaaatcagagacacatgtcaatcaaattctataatacatacttgaatgagataaagtcttcttagctaagaattttatttcattagtacattaagagaaaaatagaaaaccagtactttgggcccaaaacagagtttggcatgtgagtaccactcaaacaagtgctctttgctctttatcatcactgttaaagtagcaatagcactgcgtgctttcctagaaccagctggcctgttttctactgataaaagtggagaaagcattgaaatagtggagggtaatataaattgaaaacttatatgaaatacaatttttaataaaaagcatttgatgttgtacaactccaggtgagactattagtgtgaggtcatatttttacttctattgacagaaaacttaattgacaatattctgatttccagtgatattcatttatctgctgtatatttgctcgctttagatcaatattacctgagctcaaaagaaatcaaccaaatgaatatccacgagcattttattattgatgcatatgcttattttgcttaaagtatgttagctttttatcaaagatttatacttttggtgtgttttttactgctgagaagtggctattctgccaggaaactggcattctcagctctacccacattgactaatagtgagtggaagtgatgtgtggatgaaaagcaaatgtgtcttctcagcatctcctttttcatccattggctgaagaaagagaaggacgcagatagaaaatgaaagtgtgccgggtgttgtggctaacgcctgtaatcccagcattaggaggccgaggcgggtggattacctgaggtcaggagttcaaaaccagcctgaccaacatagagaaaccccgtctctactaaaaatacaaaaattagccaggtgtggtggcgtgtgcctgtaatcccagccactcaggaggctgaggcaggagaatcgcttgaacctgggaggcagaggttgcagtaagttgagatggccccattgcactccagcctgggcaataagagcaaaactccatctcaaaaaaaaaaaaaagaaaaaataatctctgaaagatcatgaagaagtcctctcaacatcaaaagaaaaaaaccagaggatagtgatgtcagcagaaaatatattattttgctaagcctctggaatttcagcatacatcctgcattactttaataaatatattatttcttcagttttcttttttttttgagacagagtttcgctcttgaggaaaaaaaccagaagatagtgatgtcagcagaaaatatattattttgttaagcctctgaaatttcagcatacatcttgcattactttaataaatatattatttcttcagttttcttttttttttcttttttgagacggagtttcactcttgtcgcccaggctgtagtggtgcaatcttggctcactgcaacctccacctcccaggttcaagcgattctcctacctcagcctcccgagtatctggaattacaggcacccgccaccatgcccagcttttttttgtatttttagtagagacggggttttgccatgttgggcaggctggtctcaaattcctggcctcaggtgatccacctgcctcagcctgccaaagtgctgggattacagccgtgagccatcgcgcctggcctgttttgattcttaaggatataattcacttccttgttgaattaaaactgataggagaataattcatttgttaaggtaagtggtttagggaagacccattgcttttgaccaacatctccacctccagtcccaggcattattctattttctgcttctgtgagcttgaatatttttaaactctacataaaaataagattgtttggtattagttttttctctgctgacttatttcacttagcacaatgtcctctgggtttattaatgttgttgcaaatagcaagactttctttttaagactaaatagcattccattgtgtaaatataccacattttctttatccattcccttgttgatgaatacttaggttgacttcatacattacctattgtgagtaatccacatcctttactttcatttgtttttatatcatttttccttcctttttttattcctagaagtagattattcttaaaatgtaaattatgactgttaaatattttctatgccttattttggttaatattttggctgattaagaagataagtttctaaaaaattttttcgatcaaagccatttcttcattatcaacatcgtttgagacaaaatagtaataaacatcaacatcgattaaacaattatctaaccctataatcattttctaagctgcatctttgtgtcatctctctcggttataagaaagaggcttctgattttcaacataaaattttgtaaaatttaaccttttggtctgaaaattaaactgatcagttaccagaaaagttgatttttgatacatgttattgtaattgtttctacttaaattcttcagaaaacccaaactgacaacaaatgcatttaaatttttttgaaaattaaaagtgcctggccaggcacagtggctcacgcctgtaatcccagcactttgggaggcccaggcaggcggatccccaggtcaggagatcgagaccatcctggctaacatggtgaaacccagtctctactaaaaacacaaaaaaatttgccaggcgtggtggcgggcgcctgttgtcccagctactcgggaggcagaggcaggagaatggcatgaacccgggaggcggagcttgcagtgagccgagatcacaccactgcactccagcctgggccagactctgtcccaaaaagaaagaaagaaagaaaattaaagtgcctaacaaacatttttgtagaaattaaaaatacttgtagattttcagagaatgtctctcaaatacttcaagttaccttcttctgatcgtagatacatatttttctatattgctataatagagttttggctgtcctttgtggccagctccttcatttctatcttatttagttgtgcattatttatattacgtattttacattttaaaacttgtagaccatgcaatgtaactttcaaacaattgaaaaacctttttctatgttagactctctgcttaatcagtagtcagtttattttcacccttcaaaaacattttaactgcctgaaaatcaaagggacagttcaagtgagtattctgagctggttctctccactatcaatctattcaaattcacacaggttatcttataaagaaagtgcacttgaacaacattgtcacagcaatgtaaaacaggtataatataataaagatgagacactgccttctaggaaaagagttaatttttcttattctgtgtatgtgagtatgtggcagctgtaaggttgtcaataaagactaaagttagagagggagagagaacactttacattagtaatgcagcgtagttcctatgcagccttcttgtttgtcaaacatctcttgaattgttttgtcaagtattatgttgctgtatccatcacttattagactttgatgattatcttctactttatcaattaagtatgcaatcaacatcattcagagtcctgtccttgatgtttaagtactcagacataaaactattaaaatattgattaaaaaatgagtttgttttttttttttttttttttttactacagagcatttcatgccagtaagcttaaatctcttgaacttttgaaaacatgctttagtttatctttagcttggaaagcctaaattggtcaaaagcaaatataacaataaacttgaatataaatcattttggaattgaattcaaattataaaataaaatattaaatttgataaatgtattttactgtgtgtcagaaattttacaaaaattttgaatagtgtaataaagctgaaatggaaatacatacatgcttttatgataagttattttgtgatttaaatttttaatttaacagtgttatatagtagacttcaataaaagtagtctgtgtttaaaatgtgcatattgacatatcagagaagaaaatattgataataaagaatacaaaacaaaccatgacagtcttgatggctgttgtaagacctcgtttcttgtcttcttagttaaaaaaaattagagacacacaacaaaggaaatgaagcataaagtattgcaaaggagaatgactattttaaaagttaggtgcagaatagccagtacaccctgagagagaagggattcaaggcaggctgcttataagaatgagacagaaaagactgtgactagggagactgtatttatgcaaatcttacttagttatttataaagatgtgggaaggcagggcgcagtgcctcacgcctgtaaccccagcactttgggaggctgaggcgggcagatcacaaggtcaggagatcgagaccagcctggccagcatggtgaaatcctgtctctactaaaaatacaaaaaattagccggggatggtggtgtgcacctgcagtcccagctactcaggaggctgaggcaggagaattgcttgaacccggcaggcggaggttgcagtgagccgagatcaagccactgcactccagcctgggcgacagaggaagacttcgtctcttaaaaaaacgatgtgggaagaggtgttactacaatagcatgttctaggtggttctcttggtgcacaaacacagtagctgtacatgcttgttcatacgtcgcatgtttcataagcatcctaaatcactcacaggtgtgcattttcctattatgagtaaaaggttagtttgagaacaggtaaaatcaaaatgtgcatactatctaactggagaaagtgttgcttgaatgagctgaaatactatgcaaatgctgtggtttattttgttgacaatatgcagtcatcatgcaatcaccatggttgttgcatttcaaggacatggtcactttcttgattacctatcctgcctaaatagtacgtcttaatttattcccaacttccaactctgtgattaagatttagctgttatgttaccatagacaatagtgggaaaaaaattttttttttttttgagacggagtttcgctcttgttgcccagacaatgcaatggtgtgatctcagctcatcgcaacctccgcctcccaggttcaagcaattctcctgcctcagcctcccgagtagctgcgattacaggcatgtaccaccatgcctggctagttttgtattttcagtagagacgtggtttctccatgttgaggctgttcttgaactcctgaacttagatgatctgcccgccttggcctcccaaagtgctgggattacaggtgtgagccactgggcccggccaggaaaataaaaattttaaaaataaacatatgtgagctttatctaggttattagctgtgtgtgcccaggagaaattattttacatccttggagcttcaggattcacaattaataaaaattactatttcccccggggctgttttaattcatacatggtagctgtaagtattttttactgaaactcttgtctaaatatattatagtaaatattaagaataaaattattcatatttcaaatattttattgtaattgagtgagtatattttgtcatatttcgtgtatttatccttttttaaaaatgccagccagcctcggcctcccgaggtgccgggattgcagatggagtctcgttcactcagtgctcaatgttgcccaggctggagtgcagtggcgtgatctcggctcgctacaacctccacctcccagccgcctgccttggcctcccaaagtgccgagattgcagcctctgcccagccgccaccccatctgggaagtgaggagcgtctctgcctggctgcccatggtcggggatgtgaggagcccctctgctcggctgcccagtctgggaagtgaggagcgcctcttcccggccgccatcccgtctaggaagtgaggagcgtctctgcccggccgcccatcgtctgagatgtggggagggcctctgatccgccaccccgtctgggatgtgaggagcgcctctgcccggccgcgaccctgtctgggaggtgaggagcgtctccacccggccgccccgtctgagaagtgaggagcccctccacctggcagccgccctgtctgagaagtgaggagcccctccgcctggcagccgccccatccgggagggaggtggggggcagcccccgcccggccagccgccccttccgggagggaggtggggggcagcccctgcccggccagccgccccatcagggagggaggtgggggccagcccccgctcggccagccgccccatcgcgggggaggtgggggccagcccctggcccgccagccgccccgtcagggagggaggtggggggcagcccctgcccggccagccgccccgtctgggaggtggggggcgcctctgcccggccgccccttctgggaagtgaggagcccctctgcccggccgccaccctgtctgggaggtgtacccaacagctcattgagaacgggccatgatgacgatggcggttttgtcaaatagaaaagggggaaatgtggggaaaagatagagaaatcagattgttgctgtgtctgcgtagaaagaagtagacataggagattccattttgttctgtactaagaaaaattcttctgccttgggatgctgttgatctatgaccttacccgcaacccggtgctctctgaaacatgttctgtgtccactcagggttaaatggattaagggggtgcaagatgtgctttgttaaacagatgcttgaaggcagcatgcttgttaagagtcatcaccactccctaatctcaagtacccaggtacacaaacactgcagaaggccccagggtcctctgcctaggaaaaccagagacctttgttcacttgtttatctgctgaccttccctccactattgtcctatgaccctgccaagtccccctctgcgagaaacacccaagaatgatcaatttaaaaaaaaaaaatgccaaaataagaatttttttttttttggaataccaggctaagagtttctatattgtgactttgctaagtttttttttttttttttttaatttatttttttattgataattcttgggtgtttctcacagagggggatttggcagggaaggtcagcagataaacaagtgaacaaaggtctctggttttcctaggcagaggaccctgcggccttccgcagtgtttgtgtccctgattacttgagattagggagtggtgatgactcttaacgagcatgctgccttcaagcatctgtttaacaaagcacatcttgcaccgcccttaatccatttaaccctgagtggacacagcacatgtttcagagagcacagggttgggggcaaggtcacagatcaacaggatcccaaggcagaggaatttttcttagtgcagaacaaaatgaaaagtctcccatgtctacttctttccacacagacacggcaaccatccgatttctcaatcttttccccacctttcccgcctttctattccacaaagccgccattgtcatcctggcccgttctcaatgagctgttgggcacacctcccagacggggtggtggccgggcagaggggctcctcacttcccagtaggggcggccgggcagaggcgcccctcacctcccggacggggtggctggccgggcaggggggctgaccccccccacctccctcccggacggggcggctggccgggcggggggctgacccccccacctccctcccggatggggcggctggccgggcagaggggctcctcacttcccagtaggggcggccgggcagaggcgcccctcacctcccagacggggtggctggccgggcaggggggctgaccgccccccacctccctcccggacagggcggctggccgggcggggggctgacacccccgcctccctcccggacggggcagctggccgggcagaggggcacctcacttcccagtaggggcagccgggcagaggcgcccctcacctcccggacgggtcggctggccgggcgggggggctgaccccccccacctccctcccggacggggcggctggccgggcggggggctgacccccccacctccctcccggacggggcggctggccgggcagaggggctcctcacttcccagtaggggcggccgggcagaggcgcccctcacctcccagacggggcggctggccgggcggagggctgacccccccacctcccacccggacagggcggctggccgggcggggtctgacccccccacctccctcccggacggggcggctggccgggcagaggggctcctcacttcccagtaggggcggccgggcagaggcgcccctcacctcccagacggggcggctggccgggcggagggctgacccccccacctccctccccgacggggcggctggccaggcggggggctgacccccccacctccctcccggacggggcggctggccgggtgggggggctgaccccccatctccctcccggacggggtggctggccgggctgaggggctcctcacttcccagtaggggcggccgggcagaggtgcccctcacctcccggacggggcggctggccgggcgggggggctgacccccccacctccctcccggacggcacggctggccaggcggggggctgacccccccacctccctcccggatggcacggctggccgggcgggggggctgaccccccacctcccttccggatggggcggctggccaggcggggggctgaccccccccacctccctcccggacggggtggctgccggtcggagacgctcctcacttcccagatggggtggctgccgggcggagaggctcctcacttctcagatggggcagctgccgggcggaggggctcctcacttctcagacggggtggttgccaggcagagggtctcctcacttctcagacggggcggccgggcagagacgctcctcacctcccagatggggtctcggccgggcagaggcgctcctcacatcccagatggggcggcagggcagaggcgctccccacatctcagacgatgggcggccgggcagagacgctcctcacttcctagatgtgatggcggctgggaagaggcgctcctcacttcctagatgggatggcggccgggcggagacgctcctcactttccagactgggcagccaggcagaggggctcctcacatcccagacgatgggcggccaggcagagacactcctcacttcccagacggggtggcggccgggcagaggctgcaatctcggcactttgggaggccaaggcaggcggctgggaggtggaggttgtagtgagccgagatcacgccactgcactccagcctgggcaccattgagcactgagtgaacgagactccgtctgcaatcccggcacgggaggccgaggttggcggatcactcgcggttaggggctggagaccggcccggccaacacagcgaaaccccgtctccaccaaaaccagtcagggtggcggcgcgcgcctgcaatcacaggcactcggcaggctgaggcaggagaatcaggcagggaggttgcagtgagccgagatggcagcagtacagtccagcttcagctccgcatgagagggagaccgtggggagagggagagggagagggagagggagacggagagggagagggagagggagagggagagggagagggagagggagagggagagccttgttcgcttaatttaaaaaaaaaaaaatgccaaaataagaattttttttttttggagtaccaggctaagagtttctatattgtgactttgctaagttttgcatatgattttgactgctaccattgaactcaggttgaatattaaacccacttttgtttagcttgtgtggtttttggttcatccgtaaaacaaaatatattatacatgaactgttggggtaacttggcttcatttttgttctctttctgttattacatctgtggctttagaaatcactaagattcggccaggcatggtggctcatgtctgtaatcctagcactttgggaggccaaggcaggcagatcacctgaggtcaggagttcgagaccagcctgaccaatatggagaaaccctgactctactaaaaatacacaattagcccagcgtggtggcacctgcctgtagtcccagctactcgggaggctgaggcaggagcatcatttgaacctgggaggtggaggttgtggtgagccaagatcgcaccactgtactccagcctgggcaacaagagcaaaaatccatctcaaaaagaaaaagaaaaagaaaaagaaatcactaagattcaaataacgttagttgggactcaagcaacagaaaatcccaaaaatgactcagaaaaatagctactggatagtgcctttcagtgagatttatacgtgaaacagaagccaatatattttacaaacttattgcaagttcattaaatgtagaaaataattgcctgcaacatattaggcacttgtcttagtctatggcatccctagcttggggaagctgacattacagaaaagaatattgctactctaatgagatttggaacaaatacttatgtgcttttaaacattctctttaataatccttagatacatgtcattctggctcaattcttttagtataactgtctacagttctagagactcagtcccatcaaatttaagccatggtattttcagctttttatgtttatttttagctagtgagcttaatagttgatattattatattggggtcaccatggcaatctgggccttagagttgaccatcctacctcatcctttttgtttcacatgctctgttgttgaatccctctcactttatatttgagccttaaggaggcttcagtttggaggaaccagaggaatgggtttctatatatattgagttgagaattagaatcctcttaaggatagagatcttacatttattatttacagtacaaagcagtatttataggatgtagacatattttattcaaatataaataattttatcagtatgccaatgtggtcaaaataactgcatcaacttcacccaatgttctgcttcagactctgccaacacaaagatcaatatgtatgcattcgtggatgttagtttttttttttggtgtaggttttcgtttgcttaaatttttaaagattttgttcctacattatgctgatgttaagctaaagaagtacatctaactgccattagaataaagataatgataagaatgatgactaatcttaactgctgtctgctgacagggggcactgttttggcaagtcagcagtcagatctccctcagaggcctatgtaagggtctccagtaaaacgtggccatcatctgaggctccagttgcatggccatttggagtttaatggcctgaatgcaagaaaagacaaactgggttattggaagacatgtattaaaatgaaacaagagggtaatgacagcacaaaaatcctaaggctgctgacacacccagataacaggtggctatagttatgcctgctaagatttgggtgcatggggcttggatttcgttagctccattgttcttattttcccaaacatagaaacctccaggttatgggtactctagttactcctatcacctgacaggatttgcgggataattgcccagaactgaaatgtggatccagattgttacattaaccattcctttctgtttcttctgcactgtagctggagatcactggttgatttcacaggaataaacagggttagtctaaattgcaaggaaaaacttaaaaactaatgagactataatttaatgacaagtgtatgatcagtttggaaacataatttttctctccagttctcatttttgttaaaaacacatcatgataggactgacttgtttgcaaaataaaatttagtcttatacttggcctgattgtttgtataaagtgcaggaagaataattatttttaaataggcttttaaaattcactttgatgggactctgttctacaaggaatctatgatataactttttaaagccaagccccctcatgggtttgtaatctcaaataccgaggaattaggtgaattcctttcttcttgagttcccaagtatatggggttcctgggcctgttacaaagtgacattttttactcaacacatgttaggaaccctgtacagggactgtgtagagaggtatgagaccagtttgctctaggagcttttattggctctgcaagttgagcctgattccttaaagggaagcatatttttccagtcaaagccttggtaaaacaaccagtttctccaattgtaccctgtcacaaaagaaaatggattcttattgcactgatgcaaacaaccatattaccataagttaagaacactcacagataagcttccaaattctgtagaaactagccagagaaaaacaaatatgctccaaattttgttcacaggagtatactttactcaattattaaaggctgtaaatagctcaaggtaagtttccttgactatggaaaacaaaacaaaaattagcaatgtttgaagcaaaaagttgaaaaaaaaattacttcaatttcctattagtttagtccattgagctaacttttgttctgcttgatattcatgaacactttagctcttcatgagttctgtatgtttctcctgtatttcaatgtcacaatctctaaatttatcagaaacctgtatttgagagcacctgttaaagtcctatagctgattataaaccatcttttgaaaaagatgaaaacaagaaaacaattgtctgtgaatgacaacatgtccagggaatagtccaaaacacaattgaggccaggcacggtggttcacgcctataacccagcactttgggaggctgaggcgggcagataatctgaggtcaagagtttgagaccagcctggcctacatggtgaaactctgttcctactgaaaatacaaaaattagccaggtatgtttgtgggcacctgtaatcccagctacttgagaggctgaggcaaaagaatggcttggacccaggtgatggatattgtagtgagccgaaattgtaccactgcactccagcctgggtgacagagtgagactccatctcaaaaaacaaacaaacacaattgacaaataaattttgttatctctgttttacaataacatagcaacctaactgtgattgatagcatatatttagacattagaattctagaaatcccatacaattttgaaacacatattaatattattcactaaaatattatgtgaggaagattaaacattattttggcaatcccatctacctaaacatgtcaaataattctgattttctctcttctggatgctccaggggttctctgtatcactgaagcatccaaaagctaggggtcaggaaagacaaccttgaagctgaaatttgattttgggaagcctgtcaaatattagaggttttaaatacttgatattatgaaatacaatttcaagttaccataagttatttattttgccaaaatgataacttgaaaattttaaaacaaggcaaaagcctttacttattaagaggggagacttagctttctaaacaatttgtcttttctcttttctttcttttctttggcagtctacctgcaaggtaaacagaaatgtttcattaatttttcttttttttttctccagacagagttttactttgtcacccaggctggactgcagtggtgcaatttcagctcactgcaacctccacctcccagatacaagcaatcctctcacctcagcctcttgagtagctgggtccacaggcacacacaaccatgcccagctaatttttgtgtttttattagagacggggtttcaccacattggtcagtctggtcttgaactgtagtgggatattttacggaatcagagagaccaaggggttgaggaggatatttattatttaggtgcactggcccagtcggattaacatccaaaggactgagccctgaacaaagagctaagtcaccttttaagcatttcgtggggttgggagagatctgtgcagagggaagcattttacagaagtgagaaacaaagacagttattcaattaattgagacatgcactacatcatctcttactttttaaggaaaaacattttttatgacttgagtttatctgtctagtgacaatgcagctgcacagctagagaaacagggtcttcacaatgcctgggaaagagtgagataaggctcgctagccacagaaaaacaggcagttaatttttaaaggactccagcctttctctttctcagggagggattggattttcttacatacaactgagtttctgtttacacattctttaatttcttttaattcctgttccagaactcctgacctcaggtgatctacccacctctgcctcccaatgtgctgggattacaggtgtgagccactgtgcccagccattatcttttactattacatgaaaatcttgtacaaggaagagaaagccaaattttactcttgcattagtctactattaatatcaaacctaattttctaatgaaactatataggcaattctatccaatcttaatcagtttgaccataaggtaaaattcttataaaccttttgtaatcatttataaatttgctaaagcacagactagtgccttacggaaatgtttttcttttagttcaatgcacaatttatggaataacaactatataataccctcttgaatttagtcagtatgttcatgcacagaatttcttttgcaatattaatttttatagtccatccacaatttgtttaaaccatcagttttttttttgtttttgagacggagttttgctcttgttgcccaggctggagtgcaatggcgtgatctcgactcagtgaaacctccacctcccattttcaagcaattctcctgcctcagcttcctaagtagctgggatgacaggcatgccccaccacacctggctaattttgtagttttagtagatacggggtttctccacgttggtcaggctgttcttgaactcctgacctcaggtgatccccccgtctcggcctcccaaactgctgtgattacgggcatgaaccaccatgcctggccatgtcattcacatctgctagtttgagcctgccttgatgcctccacttcccagtttagataattgggtgcttatattaacctgagctgaatttattggtttactgctatcagctttatcttatctaattcaaaataatcctttaaacctaggtaaaaatttaaactttcatcccttttataatcttttactaaaacatattttgctgttcttacacacctggcatgtaaattcatttttagtggtctttattacatgttataatggtaactcagcaattttaaactttaatgtaaaacctggtaacttattttaattatgtactaagggcagataaagttttactgtttccagcatagttggccgggctgatcttgaactcctgaactcaggtgatctgcccaccttggcctcccaaagtgctgggattccagacgtgagccactgtgcctggccttattcagcatttttaactttgggtgagggtctttaagctgaagctagtttatctctggtcctgtcctcaccagaataaaacataacattcttgacatccggatatagtaatacataggtagattgataaataaatatgaagagaattatgtttttcatgcaaatatttatgcatacaaaagatgttaatcaagagacattttcaatacatcagccaattttgaggacatagatgaaaatttacttctcatctatatgtctccattccatcaaagactcaaatacacccaaacaatgttatgtgtagacatcaacaaaccttcacatttacaggcatggcctgggaaataagtttttactattaccatttaagtctttgtgtccagcttagaatttcagaaccctgcatttcttctcctggtatgcatgtgttttttacatccacaattttgggcctgccctgatttctctattttccaattcggctaattggctcattatatcctcccaagctaagctaattggcttattgttatcatctgggttgtgctaattggcttattgaattcacctgtgcatcagggatttaaaaaaatgatgaccactgaccaatttttttttttttttttttttgagatggagtctcgctctgtcatccaggctggagtgcagtagcctgatctcagctcactgcaagctctgcctcctgggttcacgccattctcctgcctcagccccccgagcagctgggaccatagatgcccgccaccatgcctggctaattttttgtgtttttagtagagacggggtttcaccatgttggccaagacggtctcgatctcctgaccttgtaatctgcccgcctcaggctcccaaagtgctgggattacaggcatgagccaccatgcatggacttttttttttttttttttttttttttttttttttaagatggagtcttgctctgtcacccaggctggagtgcagtgttgcaatcttggctcactgcaacttctgcctcccaggttcaaacgattctcctgcctcagcctcccgagtagctgggattacaggcacccaccaccacacccagctaatttttgtatttttagtagagacggggtttctccatgttggtcaggctggtctcaaactcctgacctcatgatttgcctgcctcggcctcccaaagtgctgggattacaggcatgagccaccgtgcctgaccaaaaggtttttttttatactgccctcagtacaagtagctatcaatatcttgagcttctatattttttattctgcatgaatatggagagaatgctagatagatgattatagatgtacataggtagagaaatattttaacacatacatgcagcattatattagtttgtctatgtaaatgtttatgtatacaaaaaatgttcatcaagtgacattttcaattcctcagcctatcctgaaaacaaagatgaagacatacttctcacctagatggctctatacaattacggagtgaaacggagccacacaatgttatttataaacatcaacaaaacttaatgtttatggtcaccacctgggaaataaacttttagtactgccttgtaagtctctatgtctagcttaccactttaggggcctgcttttcttctatctgtatgcctgtgtcattcacgtctgctagtttgagcctgccttgatgcctccacttcccagtttagataattaggtgcttatattaacccaagctgagtttgttggtttactgctatcacctgtgctgagttaattggcttaatgaattcacctgcactgcaaatgtaataaaggagatgacctctagtctacttttcttcggatgctttttttttaacaggacacatggacaaatgaccattacatagatatacccatggaagttattatgtgtgtatatgtttatttatgcagctactttatatctatatatctatataggtatgtacagaataaagcttccaaagttaactaggtcagagttcatttccattttcttttcctccatgccatttaaatatgattagcaaattagttcagttaagttgtattcagtctgagccatacacatcacatttttttcataaatgtgaaactgcttttgtcacctgaaaccctgtagtttgtaattgtgtattctattaaaccactccagcggggttctgtccattcagctagaaacagccagatatgcctgacaccagtgtgcctagccttcatcacaaagcaaatttgacctgggcaataatagccatttttggcacttcagtgaacattcactatcacctggttgaaatgtggccaggtaccatgcactgttataattactttcagtatcaaagtctatcttctaaaaagagatctagacttttttccattaccatagacaccctacatcagcaacaaagagtagttgacaatagtgcacatttacattacacattcatgaagaaaagaaaaactcatcttgatggaggccccagtgagaaagaataagcattctgaaattgaggttagggtctttgtcctgggactggtttatctctggtcgtatgtacagcagaaaacgaaggatcaacattgacatggcaatgagtgactcccatggcttaagtgcatatttaaatgtgggtgagggcctttaagcgaggctagtttatctctggttccatgttcaccagaatcaatagaaacctttttttttttttttgagagggagtctcacactgtcgcccaggctggagtgcagtggtgccattgctcactgcaacctctgcctcccaagttcaagtgattctcctgcctcagccacccaataggaacaattttaacttaacaataaaaacctctttgggctttaataaatattattcttacagataagagcaataaagctaagaggaacaaagcttcacatttatgggcatggcctggatagtaagctttcagaactacctcgtaagcctttaagttcaggttagcattccaagaccctgcttttttctcaggtatgcccgtgttattcacagccatcattttggcctacctaaatgcctttgctgtccccatttggctaattggctgattatattcacctgagctgagctaattggcttattgcaatcatgtgggctgagcaaattgtcttactgaattctgggctgcagggatagaaaagtaagaccacctctgacctacttttattctgaagcttttttttacaggacagatgcataaatggacattttgtagacagacccatgtaatctattctgtgtttatatgtttatcaatctactgatcttatatctatgtttacatgtacaaaaagaggcccctaacataaactatgtcagaggtcatttgcattttcttttcctccaggccagataaatctaatcagccaatttgctcaataacttttgtttgattcaagctacccaccacatcacttttttgataagtgtgaaaatgtcctacttacctggaacctgggttcttttaattttgcctctcaccaaaccagcccattgggattctgttcatccagctaggaaatttaaaaatacctgacaccagtgagcctagccttcctcacacacaaaaaaactttggcctagtcaacaagagtcacctttggcaccttattgcatgttcgctcttgcttcacaggaatttggccagacaccatgtactcttatatttgctttcagtatcacagtctatcttctaaaaggagagctagactttctttccattaccataaagaccctacttcagccacaatgacaaaaagataagattgcacttttacatcacacactcatggaataaagaagcaaaaaccactgtctttttttttttttctttgagacaaagtcccccaggctggagtgcaatggcatgatctcaactcactgcaacctccgcctcccgggttcaagagattctcctgcctcagcctcccgagtagctgggattacaggcacctgccaccacacccagctaattgttgtatttttttttttttcagttgagataaggttttgccatgttggccaggctggtctagaactcctgacatcaggtgatccacccgcctcggcctctcaaagtgctgggattaaaggcgtgagccactgcatccagccataaaaaaaccctgtcttgatggaagttctaatgagaaagaataagcattctcagatgtgggtggccattggactttagttggtttatctctggccctatatacaacataaagaaagggtcaactttgacatgacaattaatgagttccatggccttagtacatggccatttcacagaagtgaacaaaaaggacagctgcttttttcttttatgttaaatgcagcaaaatgtatgtcagaacatacctctatttgtgtattattctagatatagtctatagagcaaataagtttatatatctattaaagtttctctctttttttttttttctttttgagacggagtcttgctctgtcccccatgctggagtgcagtggcacaatctcggcttactgcaacatccatctcccgggttcaagcgattctcctgccttagtctccctagtagctgggactacaggtgaccaccaccacgcctggttaattttttgtacttttagtagagactgtgtttcaccatgttggccaggctggcctcaaactcctgacctcaggtcatccacttgcctcagcttcccaaagtgctggggctacaggtgtgacccaccacacacagcctaaagtttctttctatattgcaattagtaccaatatttaccaatacttccacattctgtatctctattctttttaaatatgaatacaaagattggcacatcaggatatagatatacataagtaaatagattttaaaaacttacaggattatatgagtatgtctatgtaaatatttatgtataaaagaaatgttccccaaaagatcattttcaatctcttaacatatactaatgatgcaagtatagaattacttccaagctcctttgcacaacagaatttcagaatggaacatagccattcaatattgtttatataagcataaaaataccttcaccttcagtagcataggcctcagaaataagctgacagcaaagccatgttatacatgctgctttgatgaagctgcagttgttatttgaataatttcttgattggatctacctgtgcaaaactaattggattattggaataaactaagctgagctaattggctaattggatattcctgaactgagctaattggctgattgaaatcacaaggtttcagctaattggctgattggatttactagaacttagctaatttccttattaaaatcacatgagctaactttcaggttagaataacctaggctaagctaatcagcccattagattcacctgggctgatctcatgggctgattgaaattgccagggctgaactaattggctgtttggaatcacctgggctgagctaatttactgattggaattgcctgggctgagctgattggctaaatagaatcagttgggctgagataattggctaatggaaatgacctgggctcagctaattggctaattggaaacactcgggttgagctcatcaaccgattacatttacctgggctgagaaaattggctgattgtattcatctatcttgaggggcatgagtagggacataacctctgacttacttttcatttgtgagtttcttacaaaacatagtcacaaatgaacattacatacacgtatttctatgaccttgtgtctttgtatatgtttatctttttatttttgagactgtcttgctttgtcccccatggtggaatgcagtggtgtgatcacgactcaatgcaactttttcctcccaggttcaagtgattctcgtgcctcatgagtagctgggattacaggtgtgcaccaccatgcctggctaatatttgtatttttagtagagatggggttttgccatgtgttcaggctacggtcttgaactcctggccccaagtgatcaactcgccttggcctcccaatgtgctggaattacagacgtgagccagtgaacctggatgtgtatgtttatctatctacatacattatatctgtatttaaatgtacagaaaaaaagtgtccaaaaaaaccctgaagtttgctttcagtatagcagtctatagtcaagtcccagacctcgtgttttattttcttacccaaaatgtcactaagtaagattttgcatttatggaagtttttctttacattgctataaatgcaaatacttatttatcctttgacctcctatatctttattttgtatgcaaatggaaaaaatgatagatctgtatatagatatacatgagtagataaatatgaatatagaattatatgagcatgcctatgtaaatatttatatatataaaagatattaatcaaaagacattttaaattccctagcctacactgaagatgcagatgtaaacctactctaacccatatggatccacaccatctcagactggaacacagccatacaatgttatgtttaaatatcaacaaagcttcacatttaggtgcattgcctgggaggtaagttttcggcaaaaccatgttagactctagttccagcttagcatttcagggccctgcttcctttctcactgtaaacctatgtgattcacatttgccatttggggtctgcctggatgcctgcaacttcctaatttagctaattgacttatatcaacctgagctgatctaagcagctcattaaactcaccttggctgcagaagctggaaagaaaaatgacctctgacctacttttattctgaggcttccctacaggacatatgcaataaagatcattacgttgatatacctatgttacccattttctgtgtatatgtttatctagccacctatcttatatctatatctatatgtacaaaagacagccaacaagagtaggtcagaggtgatatttatttttttcccattcaggccaggtaaattcaatcaaccattagcttagtgaagatttatcaaattcaagccatacagcaaatcatgcttttttttttttttgagacagagtctcaccctgtcacccaggctggagtgcagtgggtgcaatctcagcttattgcaacctctgcctcccaggttcaaaggattctcctgcctcagcccccagaatagctgggattacaggcacccaccaccgcgcccagctaatttttatatttttagtagagacgggatttcaccatgttggccaggcttgtctcaaactcctgacctggtggtttgcccacctcggcctcccaaagtgctgggattacaggcatgagcaaccacacccggcctcaaatcttgcttttttaatgtaaaaatgtcctcattacacagcaccagggtgtttttaactcggtctcatcaaactggcccatgggattctgtccatccagctagaaacattcagacatgcctgacaccagtgggcctaacctttttcacaaaggagctttggcctggccaaaaagaaccacctttggtggttcagtgcagtgtcactatcacctatttgaaatgtagccaggtaacatgtaccattatatttgctttcagtatcacagtctatcttataataagaaacctaggctttctttccattaccataaagagcctattttagccacaaagacaaaaagaaaagtgttttcacatcgcacgctcatggaaataaacaagagtccctgtcttgatgaaagtcttaatgagaaagaataaacattctcaaattttggtgagaaactttggactgaggctggttcaactttggccgcatgtgcaacagaaagagaagggtcaacattgacatagcaatgaatgacttccattgccttagtgtatttttatctcccagaagcaagaaacaagaaaaaatccttctttaacaatatatgttaaatgcagcaggatattggagcatatttttatttgtgtaattctctagatcttgtttaaagggcagataaatttatacgtgtatgaaagttcctttttttcttttttttgaggcagagtcttgctctgtcgccaggctggagtgcagtggtgtgatctcggctcactgcaacctctgcctcctgggttcaagtgattctcctgcctcagcctcctgagtagctgggactacagtcatgtgccaccatgcccagctaatttttctatttttagtagagacggggtttcaacatgttggtcaggatggtctcgatttcttgaccttgcaatctgcccacctcagcctcccgaagtgctgggattacagacgtgagccaccgtacccggcccttgcatttcttctcagtgtgtgcatgttctactcacacccaccattttggtcctgccttgataaatccaaagtcgttatttagataattggctgattggatccacctgggttctgcgaattggcttactgaatttaccttggcttcaggagaatacggagatgacctttgacctacttttttctgaggctttctttggagacctatacacagatgaatattatgtagacgtacccatgtgacttattttgtgagtatatgtttagccacctattttatgtctaatgtatatatgtacagtaagaagccaataaaataaaattcatcagaggtgatttccattatctttacctacaggttaggtaaatccagtcagtcacttagctccgaaaagatttattcaatccaagcaacacaccacgtcactttttttcatacatttaattatttccttgataacctggcacctgggtgtttttaattttgggtttcatcaaaccagctcactgaggttctgttcatctagagaggaactgccagaaatattcactagggggcctagccttcctcacaaagaagatttggcggggcaaataagagccacctatggcgctttagagaatgttcagtattacctatttgttttattgggttttgttgttgttgttgttcttgttgcttttttgttgttgttcttttttttttttttttttttgagacagagtctcgctctgtcgcccaggctggagtgcagtggcgctatcttggctcactgcaagctccgcctcctgggttcacgccattctcctgcctcagcctccggagtagctgggaccacaggtgcccgccaccacgcccggctaattttttgtatttttagtagagatggggtttcaccgtgttagccaggatggtctcgatctcctgacctcgtgatccaccctccttggcctccaaaagtgctgggattacaggcatgagccaccacgcccggcctcttgttgctttttgaggccatcttggttggccacccaggctgaagtgcagtggcacaatcttggttcactgcaacctccaccttctgggttcaagtgattctcctacctcagcctctcaagtagctgagagtgtaagcatgagccaccatgccttgctaattttttttttttttttttgagatggagtcttgctgtctgtcccagtctggagtgtagtggcgtgatctggactcactgcaagctctgcctcccaggttcatgccattctcctgcctcagcctccggagtagctgggactacaggcgcccaccaccatacttggctaattttttgtatttttagtagagacggggtttcaccgtgttagccaggttggtctcgatctcctgaccccatgatctgcccacctcggccttccaaagtgttgggattacaggcgtgagccaccacacccagcctttaggaccccactctcatactcactgtatgtctgtgttattcatatcagccatgttgtgatgtggcttgacaacatcacaaaatgtgatgctttcacttttccaacttagctaattggctgatcatatctatctgggctgagaggattggctgattgattaacctgggtggagctaatcagcttctcgaattcacctggtttacagttgtgaaggaaaataacctcagacctacttttttcctgaagctttttgccagacgtatgcatatatggagtttgtataaacataaccaggggacccattctgtatgtttatccaccaatcttatacctgtatctatatgtattaaaaaagcccccaagaaaaaaataggtcaggactcaacaaaaaatggtatacagaaggcagaattagatcacagcttccactcagacacacagagcagcgtgttgagactcgcatcatgaacttttcctccagaactactgcagaaatataccagaaaagccaagaaaatccacaaaccctctgaaaaaagcagatgctcctgcagggcctgggagactgcccaaatgctgtgaatgcccaagctgtgaaagtaagaaagggggattgtttgccaccaaacacacactttcactgaaaaacctgaaggtctagatcacagaaaaagaatttgaccttacctggagccgaatcaatttagagagctgagcaaaatgcaggagtagaagcagcagccagaaaagacctgtgggctctctaggtcctccagaaaacccagttctgatctattttacaggggtcattggggagggatgccagaggcactgggaaaaggccacaggaagaagaaaacctccagctgaactttgtaacaattccaactggacacgaagtctcctggccagaacatgggaagggtgtgagtccggtgtgcacacatgacaggcggtaaggtgtgaaagtcctgcttactttctcagttggaaggctgggagcctgtggcaagttctcagccctacttacccactgcctggaaacagacttggtgctgttggaggtggcacggtgagagtaagacagaccttttgggttgtacggaagctgggtgaggcctgtaactgctggctttcccccatttctctgactgacaacctgaatgacacagcagaggcagccataatcctcctgggaacataactttgttgacctgaaaaccacacccccactccccatagcagccacagcaagccctgcccaaggagagtctgagctcagatatgcctaaccctgcccccacctgatggtccttccctacccaccttggtagctgaagacaaagagggtatcctcttgggagttatggggccctgcccactgcctgatcctccttttattaccacagctgatgctgttttgaaagcaccaccttttgtcaggagcacaaaaatagtacattaaacaaccaaaattaagaaacatcacagagtccattttactcccctgccacctccactgaagcaggtgctggtatccatggctgagagacctgcagatggttcacatcaaaggactctatgcagacaagccccagtaccagccctcagcctggtagttcttctaagttgctagatccagaaaagaaataacaatcactacagttcagctctaagaaagccacatccctaggaaaagtggcagagtactacatcaaggcaacaccctgtgggacaaaaaaatctgaacagcagtcttgagccccaggtcttgcctctgatattgcctaccaaaatgagaagacaccagaaaaacaactctggtaataggagaaaacgaagttctttaacaccctccaaaagttacactagctcaccaggaatgaattcaaaccaggaagaaatccctgatttacgtgaaaaggaattcagaaggttgattattaagttaatcaaggaggcaccagagaaatgcgaagtccaattttaaaaaatttgaaaagatacaagaaatgaggggagaaatcttcagtgaaatagatagcatacaaaaaacaaatcacgacttcgggaaataaaggacacacttagagaaatgcaaaatgtcctgaaaagtctcagcaataaaattaaacaagcagaacaaagaacttcagagctcgaagacaatgttttcaaatcaacccaatccaacaaaaacaaagaaaagataattttaaaataataaagcctccaagaagtttgggattatgttaaacaaccaaatctgagaataactggctttcctggagaagaagagaaatttaaaagtttggaaaatatttttggtgtaatgatcaaggaaaactttctcagccttgctagagacctagatgtcaaaatacgagaagctcaaagaacatctgggaaattaatcacgatagatcattgcctaggcaaattgaggtttttagttttctagtaaattagccattaaaataatttgttttgttctaatattgttgtattcttctgaaaacaggtacaaacccatagttatacaaacacacttactgcatgtttttacacctcatgtttgtcttcagagtaatatatgtatatatttaatcctacttaaatcaaaactaaaaatctgtaaatttttgcaggcagagtgtccacatgttcaaagaaaaatatgtaacaagtttttaaaaatatttaggtctcagatatgtatggattttatgtatacttgtatataatttttattatgaccgtaaaatgaccctgtagtcaataacaatttaattgtacattttaaaataactagaagtgtagaattgaattgtttctaacttaaagaataaatgctgcctggcgcagtgactcgcgcctgtaatcccagcactttgggaggccgaggcaggcggatcatgaggtcaggagatccaggccatcctggctaacatggtgaaaccccgtctctactaaaaatacaaaaaattagccaggagtggtggcaggcgcctctagtcccagctacttgggaggctgagacaggagaatggcatgaacctgggaggcggagcttgccgtcagctgagattgcgccactgcactccagtctgggtgacagagcgagactctgtctcaaaaaaaggaaaaaaaaaaaaaaaaagaataaatgctggaggtgataatccctcacttaccctgatgtaattatttcatattgtatgcctgtatcaaaatatgccatatatggcataaatatatacatacactatatgcccacaaaattttttaaaaaatttaaataagaaaaaaaataaaaacttaacctatgagaacaatagtctctcacttatttgcagattaaagccactgaaaaaatagattactagagatgttattccactatgttactaaataatatactgttaccatgttttacctacacccttgagtaaggtgggataggttaaagttagtggcataataacacttcattgagtgcacaataaaattaacatgttaaaaaatgttacaaaattaagttcacatataatctaaaaatttttaatataccatattttattacatataagcacaattataatgatatactactaattttatttttaattttaactaaaatttaaaaatgtttttctctcactataatgcacaagaatattacttagaaacctacctcatacactacttaatattataagtcaaccacaaaaagcctcttcacttagattttcatcatgcatcttatattttaatatccttattcttttatggaaaagttcataaataatgcccacttaataaaaataatctctcatatatctgatgcagcaattgatcacatgctttcacatgtgaatacaatagaaacaaagagcagaaaataatttgagagttcaattgcatcattatttgcttttcaaaaagtctgtattttttcaataaaaagtatacttcccatgtaattataactctacaaaaaatctactccttttaaagttatatacaaaaaacttatctaacaattttagtttggaattattttctatactcaacactctgatttagtgtaatgtctgacatttcagtgccttattattactactgtatattctctggtactgacatagacttaattttggataaaatactctatatttactgtatttacaaaaaaaatcttagtatacactctgatgttttctaagctgtagttttttaaaaaatggttttccaaattcattaaatttgcagggtatttctacagtataaatttcctggtgttgaataaagtttgagcaactgccgtagggttttcctctagcacaaaatgtatacaacaagatctgtaatagaattaaaggcactaaaaccctttttatatttgtaatgttcgttcatgttcaaaattaatacactttttttttttttgaggcagagtttcgctcttgttgccaaggctggagtgcagtggcgtgatcttggctcaccgcaacctccacctcctgggttcaagcgattgtactgcttcagcctcgcaagtagctaggattacaggcatgcaccaccatgcccggctaagttttgtatttttagtagagacaggctttctccatgttagtcaggctggtctcgaactcccaagctcaggtgatctgcccgcctcggcctcccaaagcactgggattataggcatgagccaccgcacccagcccaaaataaatactattaaaggtttatatattctgatagatcttttgacagtaattgcattgttaatgctttaagtatgaactccgtgatgttgagtaagatgtgagcagatatgaatggcttttccacattttttatattagtataatttttctcaagaataaatgctttcctgtgcaataagatgtgagcactgagccaggcacggtggctcacgcctgtaatcccagcactttgggaggctgaggcgggcagatcacctgaggtcaggagtttgagaccagcctgaccaacttggagaaaccccatctctattaaaaatacaaaattagctgggtgtgctggtgcatgcctttagtcccagctactcaggaggctgaggcaggagaatcgcttgaacccaggaagcacaagttgcagcgagccaagatcacaccattgcactccagcctgggcaacaagagcgaaactctatctccaaaaaacaaacaaacaaacaaacaaaaagatgtgagcattggttaaactttttgtcgtattctccatacttgaagaagttttctccagtataaattatcttacaatcaagtgtgacaagaatttaaaggctttgtcacattactcacacttctactgtttcttactagtatttcttttatttttagaagtttgaggtgttttcaaaaacattgtcacatctttcagatttgtagagtttctctccagtatggtttgagaacttattaaaagctttgccatattcttcacatttctagaatttctctccaatatgatgtatcctatgtgtaataagggttcaaaagttaaagcctttttcacattcttcgtattcttaggctttatcttctgtataaattctctgatgttcagtaagagttgaagaccaattaaagactttgttacattttttcacatttatagggtttgtctccagtatgaattattttacgttcaataaggtttgaggactgattaaaagcattgccacattcttcacatttgtagggttttctccagtataaattttattatgtctagactacagagctcatggtcagattaacccatatatgagctctccctgccacataaagatgatctttactgaaaaggaacaaattgttcctcaactgaaaaaggacattacccacaaaaaaaaggtgtcccagaagaaactgaagaaacacaaacttatggcctgtgagtaaattcagcattaaaataaatgcaattaaaaaaagaataacaacaaaaatatttaaaatatcaataaaccctagaaattatggaggtaaaaatacaaagtgaaataactgaaaatttttaaaagtaataaaatgtgatgtaaaaatgaagaagctcaacaaacaaactaggatgcacacaaagatatttctttcttttttttttttgagacccagttttgcccttattttccaggctggagtgcagtggtgcaatcttggctcaccacaacgtccgcctcctgggttaaagcgattctcctgcctcagccttcttgagtagctgggattacaggcatgcaccaccacacccggctaatttttatatattttttttagcagagacgaggtttctccaggttggtcagctggtttcaaactcccgacctcagatgatcagcccgcctcacctcccaacgtgctgggattacaggtgtgacccactgcacctggccacacaaagatatttctaacaaacatatatatataggcacaatttttaaagtcacagacaattagagaatcttgagagcttcaaggcaaaagtgatgtgtcatttaaaagcatagtctaatgagataaccagtaaatttgtcgacaaaattttgcaggttaggaggaaactgtgtgatgtagtcaaagtcctaaagaaaatagttgtcaagtgagaataatgctatcagcaaaactgtcctaacaaataaaaagaaaaagaccttgcaaagtaaccaaattcggaaaaagtatattggcatttcatatgccctacatattaaagatgctgaaatgagttccttccactgaaaagaacatgatgaaggagaacaacacataattttataaaaatacataactttctaaaaaacttacacacatacacaaaacagaattccttagcattatcaaaatggtggaaaaagcacttttagtgtctaaaatttgaaacataaaagcatagaaattatggtaaacacctgttaatgaatatgcaacataaaaagataattagcaacattaataacaaggtttagggcacatgtaatgaggaagaaattttacaggcaactaaagttaattttttaccagattaaaatatattgttgtatcttttaaaggttttatgtaatctccaaagtaccatagaaaaaacctgtatagactacagcctgtagctggtactacaggcacatgccacccgcccggctaattttttttttttttctgtatttttagtagagacacggtttcaccatgttagccaggaaggtctcaatctcctgacctcgtgatccacccaccttggcctcccaaagttctgggattacagatgtaagccactgtgccctgccaacaataatacaataatagatttatgcactgggaacctatgacaaatttgtacataagtttgtgtgtgtgtgtatctcatattagggttctgaatatataaagcaaatattgaaagaattgaagaaacacatagagagcaacataattatagtgagatatttctataccttgtgttcaataataaaaataagacaaagcagaatattagtaagggaacattagatttgcaggcagtataaaacaatgattcctaagaaaggtatagagaatactcctcaacagcataggacacacaccctttgcagtagctcataacattctctttgatagatcaccagttaggtcaaaaaagaagtcttaacacatttttaaaactaaaattgtgtggattacttcttataaccaaaattgaataagaatatataaacaacagaagaaacctgaaaaattcacaaatatctacaaattaaacaatacactcttgagcatgctcttggtgaaaagttgaaataattaatattgtgaagatgtttatactgcccaatgtaatctacagatttaatgcaatgtttttaaaatttctcattgcatttttaaagagacaaaaacagcaaatgcaaaagtatatgaaattgcaagagacaataatgtaccaaaaaatatttttaaaaaaacaaatcggaggcattacagttcctgatttcaaaaaacattataaagctaaagaattaaaacaatttgaatgagtgtaaaggtaaaaaaaagtagactaataaaataaaatgcaacacatacataaattttcacatatatggtaatctgaacagttatttgcatacccatagttattgaagcattgttattgtaagccaataggcaaaagcaatgcaaatttctgtcaccaaatcattcagtagagacaattagaaagataaatacattgaaaattcactcagttttcaaaaataaggaaatattctaacaaatataaacaaatataacagatctctgtgactatgtctagttagttctcaggaccagttaaaagctttgttttttataacaaatctctggcccagcacccaggtgatgtgactctcgtgcttgctacctacacaaatgtggatttgttacatatatactgtcccatctcacaagtaatatgatgactttcatatcttgaaccagccagttgctgagatactgtctcccaaggctaggcttagggatatgggtgtgatcgtgggtctcctatttttctgcaggtcagaggggattaccacactctcacatatggtataaagccattgaattgtacacaatgtgtcaccacagagcccagcctacaggtgaagttgacttgcacatatgcacaacccatcaaccattaaaattgtaaccctcacagatggatagacctcacttgtgaatcttacacatggatgcagttcacagttggatttgtgactgtcatatgtgagcatctggccagatttgtgatggcgaaacatctttaaatgcagcttataagaagatgagggctctcctatctggacccagaacattggagagatgttgcctctcctacctaggtttagggacacagatacaatcataggttcataccagcaagaaagtctcagactagattgtgactctcattcaaactgtataaagccctagacccaacacctaggtaatgtgagtcttctcttttacctgggcctctcatattttgagtattgtgacatattgctaggcccaacacctagggtatgggaggctcttgcctaaaacttactcacagaaagccttgtgacatatctctgcatacattacctaggagatgactttctcctgcttgcaccctacccataggagaaattgtgacatattactaggagcagcacccaggtgatgtgactttcctgcctggtctctgtcctcagggaatgttgagaaatatctctagatccaaacccacatgatgtgactctcctgcatgcttcctatccacaggtggaattgtgacatatgtctttactcaggtaacagatgtgatgatgaccctcattcctcaaacctgccaataagagaaatactgtcttttgtaggtagacttagaaaaatgggtaagatccttgggtctcctctttgtacaaagatcatggaggcttatcactctattgcatgtaccataaagcactcagcttgtactgagagtgtcaccacagagaacagcacacaattgaggttgtgctttacatatttacactgtggcagtcattaagatcatcaccctcacacatagaccgagcccactgaggaggtcctgaatcccaaatgcagacacaatctacagttgcaattgtgacagaacattcagcctctgttaagatagtgattcattcctaaacccaaatcataggtaggtaaagactgttctatctggaacccaccaataggagagatgttgaccctcatacctgggcttaaagccacaggtaaaaatcacaaatccatactagtatgaaggtttcagaatagattgtgactctcgtgcataccacataatacccttgtgtggtacagagagtgtcctaacagggcccaggagtcagatgagattgtaatacgtgtgtgcacatccagctgatagtaaaaattgtcatcctcccacatgaacacagccctcttttgaagttcttaatttcataccctgtggcagtggaaagttggaaaattgactatcatccatggatccaatccacaagtgggttggttaatctcagacattcagcacacaggtgaggctgtgaatcctcaaagaggacacagtttgcaggagggattgaggctgtcatgtatggacccactctctcattgagattgcgtgactcctgtttttagagccaacatacaggaggtgttgactctcgtaaataaaacctagacatgttcaagattgtcaatcacatccctggaccttcctaggtgtgattgtgacataagcctctgcccgggaccttaataatttgactctcttgcttggggtcagacaacagataaaaacatgacacatccatggacccagcacctaggtgatgtgactttattcttttgctgtggctccacccatagagagcattttcacatatcaaagtgctctgtagacaggttatgtgactcttttgcctgtgtccagacaacattggccactgtgacatattgcagggtccaacacccaaaggaagtaactcttatgactgggttctatctacagagggcactgttacatatttctgtgctcatcactcagttgatgtgactctcctcttctgcctgggccatgccttcaggagagtgggagatagggagagtgacttattgctaggcccagaacacaggtgatgtaatacttcttcctggtctctttccacaggagttactatgatatatcattaggcccattacctagatgatgtgatactcctgtttttttctgcaacttgtgcacagtgtggattgtgaacttggcttagcacctacatggtgtgactctcttctcatgactaggtcttatcactgggttggttgtgacatagagctgggcccagtcactaggttatgtgactctcctctttttcctgagccctacccacaagaggacatatttctgggccattcatcttggtgatgtgaatctacttcctgggacctcccctcaagggatattatgaaatattgctggacccagcacctagtgatatgactctctgcttttgcgtgggcactgcatacatgtgtaatatatagctaggttaaacacctgggtgatgtgactttcctgcataagctctgttcacaggaatgttatcacatatcattttgttcatcacctaggtgatgcgactctactcttttcctgagccctgcaaaaaggagagattgtgacatatcactgaactgagcaccttggtgatgtgactatcctctcttgctcaagtgtcacatattattggtattgtgacatacctctgtgaccaacacctatgggtaggaaaacttccacccagactcagcccaaggggccctcatcacttttttaaaagatatgtgacttgaaaaatgtgactgtcttctgcttataccctgccctcagggaagattgtggcatattactgaactaagcaacctagtgatgtgtctcttctgactggggtttgcccacagagacaattgtgacatatcactgggccctaggtgatgtgactctgctgcctgttcccaacattcaagagaggattgtaaatcttcctggccaagaattcaggagatttgactctcctttcttgtccctgccctcaaagaagattatgacgtatcttcagccccaaacccaggtaatgtgacttccctgtttactctctcttcaggggagaaattattacatatatcctggcccagctcacaggtgtgatgacagttctcatacctcaaacaagtcagtagaagcgatactgtttcttatagctaggcttaggaaaacttataaaatacctgtgtctcctctttatatgacggtcatagagaactaccatgcacttgtatatggtataaagctcttgagtggtacagagagtgttcacatgtcccaaaacaaaagggatattgtgtttcttgtatacacacccagacacctgttaggattgtcaccctaacacctggaaacagcccattggtgaggtcttgtgtctcacatgcagatgcaatccacagtttgattcctgactgtcaaatgtaaacacctgtccaaagttgggatggtgactcatttctagacccagctcatagacaagtgaggactcttctgtctgggcccaattaatttgagaaatattaacttttctacctgggcctagggagcagcataaaggtctcagggaaaattgtgactctcattcctagtctacgatgatcttgggtagtattaaatgtcctaacggggttcagcgcacaggtgagattgtgacagtgatatccacacccaactgacagtaaaacttgccatctttcctcatggatacagcccactgttgaggtgttgaatctcataaccaaaggcagttgaaaattaaaacattgtctctcattggtagacccagtccacaggggggttggtgactctcagaccaaaattcagcacagttatgaggccatcactccactaagaaaacggaattcatagaaaaaattgagacgctcatgcacaaatccagcccaccactgagattgtgactcatttgcttagacccaaaatataggaagcgttgactcttatacctagaattgggacatgtgtaagattgttcatcttttcctcagactttcctgcaggagtgatgctgacatgttcctctatttggcatctgagtgatatgactcttgccatggtctagcccacagatggaattgtgatgggttgctctacccagcacctaggtgatgtgactccatttttctgcctcggcactgtccacaaaaggtattttgacatatctctggggtatatacccaggttacatgactctcctgcctgtgcccttttcacatattatcataaaatattgctgggtccaacacccaggtgatgtaactctcatgcctaggacctgccaacagggggaattgtgacaaatctctgtgccaataacccaggttatgtgactctctttttttgcctggtccctgctcacagggggcattatgacatattgctgaactcagcacctaactgatgtgattctcctttctagtttttgtccacaggggagattgtgacatatcactgggcctcaaactaaggtgacgttacactttcatttttgaactgtactcagaaggcattgtgatatattcctgggaacagcaccaaggttatgtgagtctcctgcctgcactttgcccacaaagggcattgtaacatatatttagacctatcaactattcgatgtgacttcttttcttaacgtgtaagcaagttgccccaaccatggagggggtcgcggtggtgacggcgggcagcgtaagcgctgccaaagccgagggagctgcagccttgccgcctccgcctcctgtctccccgcccgccctcaccctcgcacccgcagcgggtgaggagggaccggcgcctctgtctgagactggggctcccggctgctccggctcccggccccctgagctggagccagagcgcagcctgggccgcttcagaggccgcttcgaggataaggacgagcagttggaagaagaagaggagctagaggaggaagaagaggaggaggaggaggaggacatgagtcacttctcgttgaggctggagggaggccggcaagactcggaggacgaggaggagcgcctgattaatctctctgagctgaccccatatatcttgtgttccatttgcaaaggttacttaatagatgcaactaccatcacagaatatctttataccttttgtaaaagctgcgtcgtaagacatttttactacagcaacagatgtccaaaatgcaatatagcagtacatcagacacaacctctttataaggttggaccgacagttacaagacatagtgtacaaattagtgatcaatctagaggaaagagaaaaaaagcaaatgcatgatttctatcaagaaagaggtctagaagtacctaaacctgctgttccacagccagtcccttcaagcaaaggaagatctaaaaaaatccgagaatcagtgtttcctattccacctgaacttgatatgtctttattactggagttcattggtgctaatgaaggcacgggacattttaagccattggaaaagaagtttgttcgagtttcaggagaagcaactattggacatgtagaaaaattcttcagaagaaaaatgggtcttgatccagcttgtcaggtagatatcatctgtggtgatcacctgttggagcagtatcaaactctaagggaaatccgacgtgcaataggtgatgcagcaatgcaggatggtctgcttgtccttcattatggtcttgtagtttctcctctgaagataacttgaagattctaggcacattatgaggagggaaacaaaggaggcttctgcaggactgcatctcaccaaagatttccatgaaatgtaattgctaccactttgctgttcaagacataacttacctatttttagcaccaagaattatagcatttataagtacaacttggaacgatggaatgcatctgttactagagactgtatataaaaagcagcgaaagctcaggggaaatttttcaaaaattgaattttaaaatttcttatgattttaaataccttgacattgattttgcttcccatctttgaagtaattggttagttttctttgttcagccatttcaagttggtggttgggatatctgctctctgggatggcatcagttgggcagtcatccttttggaagagaagtgtgcttttgaatggaagatccaaagccagtctttgttaaactgcagggcgtactctcaaagaccaaaactattggccacttttgtatgttgccagcatattttgaacttgtatctttttttatactagcaacactacaaaggagaagttactcatttcaaaatggatgaattgttattatgtgtgaagagactctgagtttatggtctgtgccataaactttcagtgtaataagacttcttcaatacatcttccaataaggggtgcttctttgtgacagtatttttatttctgacattcattttatttgggtacatagtgtggttgttgataccttgcaaaagtattgcttctgaaagtaataaaaaattttaggagaatttgagaagtttacagaattacttattcattgttttcttggtaagtcagtttaatgtttatttttctcattatttcatcactggaataaagaataagggtgtttgagctcacctccatgcaaagacttcagttttaaaacattattttgcctaaaattagcattgtgatgctctctaaaagaaatattttataaaccctgttcacagcagaatttctgaatctgtatagagactactacaaaattggacaaagattggcaattctttgtaaagaatttgtgaactgtgtataaatttattctaacatttaataaaaatgtatttaaacctaaaaaaagaaaagaaaagaaaaactgaaaactcgattgggtcagatatgtcatttctattctatactttttttctggaagtagttccttcctctcctgatgcagagggaggctggctgggggatcctgggcccctctgtcctccccgcggtggcagtggctgatctctgctcaggtgtgaggggtgtggccatgtgctgggcttgagcctgcccggcccagcccctcctcacttccctggactcttcacggtgtccacaggcccttacacaatcttgagcatccctctgatggaaggggaggtggcagcagaaagccagtgggagaaactggccccacaggtcaaggagggcttgcccagctgtgggaaatgctttggttgacctcggatttctgtgcgccaagctgagccccaatcctggctttgagtccaggtgtcctcgggctgggcgaccttggccgtgggcgctctggctgctgcggtggttcctgctgtgctcggctggatcacaactggaactggtgccctccagaagtgaaggaggtgccccgcaggtgggaggaggcagtagccatggtccctgtaaaccaggccttgctgacaaatctcagatgccaagaacagaagaacggagagcttctgccaaatgaacaaactgttggagcgactgagtgtgaagctgcccaaactcctcaaagtggagcagtgaagcaaacaccagagaaggacaagaaaaatgaaagtcaaagaaaatgagcagaaaccaaaggcagatgctaatgcagtgcaaagcagttcacaccatgatagaaagagttgatgagtctcggaaactaatcttagtgacagagtgaaaggacagcagtgaacatggtaaggtgctgacgattctggtccactggatcccaccatccctaggacagtaaataccatcacagtcaccacacagcgagttacaactgcaccatttcctgtttattcctaaatgaataaaggtgattctcatcacaagtgcaaataaaaagttatttatcttttttttaaactaaagtgtcttgctttagcttttttttttttttttagttcttataattttgaaaatgaagttgacatttgtatggcttatgaaattttcaatagtcttgcattagttgaattgttcaaagtaaatatattttaaactaagaagagtaaactgtgtgtatttgttttacatagtaaaggctgaaagtaacaaatattatctgtttatgatttgaaaatttcaaagtttgattatttatccatacatacacagaatagtgtatcgtgctgaaacatttgtgttttaaagtggcagccatagttcctgcctgtctggatatattttggacttttgtatgttaaatacaacgtaaaaagactttattgtgctttagaaaatctaaggttggtatacacaaacaaactttacaaattactgtagggttcagcaaactgtgtttataatgtgacattaatacctctacattttgatgtgtaaatctttcttgagaaaagattgttttttaaaaaaatggctacaaattcaggcttcagttataaaatgacaaaatagtaaagaaatgagtggtttgccatactatatgaatactggcattcaattaaaataccaaatatgttaatgaaaaacttttagacaatagatttaaataatttcttgatattttactacagtaataaatattcacaaatattttataagtcatatctattagtactaggttttacttaatagtagtatatatataagatcaaaaatctgttaaaaatagatatgcttatcaataatttggtgtttctaaatacccagaagtcttgttttaatcagattagctctggggatagtttactaatttcattttatatatggtgtgttcaaagttttgtagttaaacctaatattgattgatgatgggtaaacaaatctttttttgctaattccataggtttattaaattgttgaagatgttgttaattaaaaaattccaactttcaatgttgtttacagggatttaggtctagtttaatctgctcaacctgttaatcagtgtcaggtgccggattccaatttattttcagtgcgtttgtatgacttttgtttttttttctttctttttttcagacagagtctcgcactctcatctgggctggaatgcaatggtgcaatcttggctcactgcaacctccacctcctgggttcatgcaattctcctgcctcaggctccccagtagctgggattacaggtgcacaccaccacacccagctaattttttgtatttttagtagagatggggtttcactatgttggccagactggtctcaaaatcctgaccttgtgatctacccccttcagcctcccaaagtgctgggattacaggtgtgaaccaccacacctggccaacttttctttctttagtctttgaataaaacgtctattaacaaagacaaatttctacacatttatcaagttccttttagtaactcaaaaggtaatatatccaaaattctcatgttattgtctgagaaaacagattctactgttaccaaaaaatcaactggaaggcatttttataaccttgcaccacataagaaaaaaactgtaatgcagtagtaataagtgaagatacatcaaatgaaaaatggtaattgagaaagtcactttcaatgtttgagtatttggactttttgtttaaaaaaattgtagtaaaatagagcttttggtaagctttctatagattaacattatcataaattaggaaaaaaacctttaaattgtaaataaacaaacaaaaaaacaacaacaaaaaacaacaacaaaaaactaagatccaggactgcatacatattgatccttattttgggagattatgaaacagaccattgcatgaactttatatagataccttgccacatgggcatactaataaaaatcattatatttaatttgaatgaacatgtccacatcttaaaaatactgctttgtactatgaatgataaatgtaaaagtttttatacacaagaggatcctgattcttaactgaacatatatggcaacccatttctatgtttcttctgaactgaagcctgattaaggcttaaatgtggaatgagagggactcaataacaggacatgtggaacaaaaacaaaaaaatgagataggttggtcatttctaagttcaaattattaaataaaatattaaattcttgtcctaagtttttttctttcaaaaacaaacttgaaaactgttctaatccagttttctttcatgaagggcctactcattgtgtggaactgaaaggaggtcctagggctactgaaggttcctggctgagtctatacctcaatgttacctaaaagcccttggactaactccagtcctcaacagccaatgagggtgttggcacaagaacttccagtctttttttatttcatttcatttcatttcatttctcttgttcttgttctttttttttttttcatggctatcatttctcctatccgttctttgtatgcaaagttgtgaatgtttttacagcctatggatataatcgtgctgagtaaagtcagtcagtgtcttggtaatcaaatatgtaactcaaaggtgttgttttataatttcctagcaacagagtgaattcaaaatctctctaaatttttacttagtaaaggtctttctctcccccagtaataaacattcatggcactgtatgagagaatatttcactctgagttaataccctcctttgcatttcgttttttccctccatgtgaaagctgagcactgtccaatgtatctaaacagttcctatatgagacaagttcattttttttgttctggggcatatgctataggaacagcctatcaaaccccaaacctctttctaacttttgcctaaaaatataaagttggagtttttacctagcatttctaattttacagcacccctagtggaatgggattgttctccatgtgaagacttgccaacactctgtccaaaacttacagttccccaattattttcccttttacatccctttatcagtgataagtcctcatgccctatttgtaaacagaaaaactcagctttcaacagccagaagaaaggctttctaacaaaacaaatcttcaatttttacacatttttaaggcacctgttcttcatcaaactacattgaaatttaaacagaaaggaattttatgtttgaaagtaaactcgtcccattctctgggattctgatgttttcctggggccgtagtaagggaagccaaaaatggcattagggcattccctctaaaaaagtatcttgcctaaatccaactactgcataatctctccccagccactggagtaccttgagagccttttgcgctgagtgggtctagaaaaccagcaggatggaaagctagggtcttgagaaggtgagcacaatctgtcctgcctatgaactcctccggaaccatgggtaaaggtcatgcttccatccatgggtaacatctatgatggttgctgggacacagaggaaaaaaaggaaggttgagaagtggtatgtcctttttctctttccttccaccctaggccacactgaaaagagaaaggggactgaggaacgccttgtctcccctctttctctagataggtaacaaaccatcgacagtctgcattcccctctagtgcattctgaaacactggaacttctttaaccctgaaattctaaagaaaaagtggcttatattctattgcataaacccatggccatcttagagacagtaggcctggctttctaagggaagcattaatttcaacactgtccaacaaatagatctttctttgccctgtgagacaacccagatctttgtaagcattgtaaaattaaatctgccttcttggcagccatatcagacaagtctacaacatataattaccaaaagttgagatacaaacccttggggaacactcaaatgtaacttccaggtgccccagcagcctcacatattttgggcccccaatacccatatatcatcagctcctctggttgtgccactgaagaaacccacaacattgctgttaccccctacagaaaatgcccagtagacatggtgttactagtattcaagttcccttctagttgcaggaccttaagaaaataaagtgaaccccaggcaagttctctaatgacactgactcatatatagaggctttccaaaatttaacccaagtgtttaatgttacatggagagatgctatgctgcttttaagccaaaccctaactgttaagaaacaggcagccttacaggcagcaaaaaaaaaaaaaaaaaaaaaaaaaaaaaaaaaaaaaaaaaaaaaaactcaaaaacaaacagtaggtttcctagagccagtcagaaaagaaacccagtcaaaagggaaaaaaaagagacataatccgcattcccaataagaataaaaacaatgccccttaaatattctaatgggagcccttgtgatcttatagagaagtggaaaagaaaacactttctgatgtgcatattagaaagtttgcaaagaaccacaatcaagcatattaattactctaacctctccttgttaaatcagaaaccagataaaaatcccatggcctttttgaaaaggctgagaaaaactttagtaaaacaaacctccctgtgttgtgattcaggaaaaaaggtttattacttaggcagtctctaatatcagaaggaagctgctaaaacaggccctgttcaaacacctttctaggttttgtcatcctcaagttgaaactttgcagtatttaaataacactgttctctctgcctcaactgaagaggtctcaggaaggcactaaggctttcctcaatttattagctgaaaggaaatatagggtctcaaaatttaaagctcagctctgtcaaactgcagtaaagtagataggtctagtcagaaggtacaagaacaccaggtaaagaaagaattaaacttattttctccttttcctttccaaaaactcttaaacagttgggagggatcttagacattactggatttttgcaaattctgggtatttgggaatggtgaaatagttaatcttttataccaccttacaaaaactcaagcacctaaagactcacttggtaacttgggaatctaaaactaagaagcctttaaccaactaaaggcagccttacttaaagcaccaacccttaatcttcccataaggaaagcatttaatctctatgtatcaaaaaggaagttaatgaccctgggagttttaactaaggctcaaggtccaggtcaacaaccagtgggttacctaagcaagaaacttgacttgatggctagaggatggccagcttgcctcttaccagttttggtggtggcttgctggtacgaaatgccatgaagttaacaatgggaaataacttaactgtctgcattcccacataggactgctgtcctctaatgcaaacctctggctaataatcacctcctcaaatatcaagctttgctgctaaagtgatctgcagtccagttaaaaatttgcctttgcctgaacccagccactttctcccagaggaaactaaagagcctaaacgggattgtaaacagctagtggtgtaaactggtaaaagaaataagaagaatcactgtttatattctttgtaaagttttaattaattaaataaacatttttaaaatgtactcaacttaatgaaaagtgaatatccaagctataagtatattcaaaaagcctttctatttttatctttataaaacttgttttcctggaagagggttttatctcacttaactgaattacttttatccactctttcttgtcactgttgatgcaagcatagaaggccctaaaataacctctggtggcctaagactcctcaggaaaacaaaaaagccaccacaaattacattttaaaagaaatctctgctttttttaatgaaactcctagaattaaaagtaaataagtccctctcaaaatctctttttcttctagctatgcttatttgttaggccctggaaactgtattcctagccctgtcctttttttttttatgggggacagagtctcactctgtcacctaggccagagtgcaacagtgcaatcttgtctcactacaacctccacctcctgggttcaagcaattatcctgcctcagcctagtgagtagctgtgattgcaggcacctgccaccatgcccagctaaatttttttatttttagtagagatgtgttttcaccatgttggccaggctggtctcaaactcctgaccgcaggtgatccacccacctcggcctcacaaagtgctgggattacaggcgtgagccaccatgcctggcccctaaccctgttcttaaatggcctcaaatagagaccaataatccaattagaaaattggcaaacaaaaaatcttatagttactgaattttcttctgtttgtttagatggttatatacgtgttttgtgtgaagtctataaaaaacctctaattaattggtgtgcaaataagcacttcaaaaaaaattaagacaaaattaaggctgtagtgcctcttggttcatgtaactttaatatttaagaaataaaaacattcttgtaaaatacaaacgtcttaaaatgtaaacaggtggtctaaattatgcaggtcaaatactaggtttgttaaatgttttaatgttgtaaactgcttctttggcctttaagtactgtcaacctgccagcttcacaattagtaaggcctggtgacatataaaagtaaccatgcccctaactatactggaagaagtcagactttatctgctcctagcacataattaaaacaacttaccaggttttacattaaagttaaaattacaaaaagttaccattgtaacatgtaattgagactattaaaaatggatttgcatgaaatgtgtgtaaaatcagtaaaattttttaataaaaaattataagaaggcataaaaatctacatttttctcaggagtgaaagattgtcttaaattaaataaagtgaaagttttaagcaaatttttaaaatactgtaaaaattaattttgcaaaagaaaactgtaaatatatgaactaaattcaaaggaataacatatggtgttcctttaaattaagcatttaaatgaaagcacaacaagactttcttaagatgctaatctgctctgtatcaaaatttctaaaagattataaaagatttgtaaacatcaaagatccattccaagatgggcaaataggaagagatctggtctgcagatcccaacgtgatcaaggaagaagatgggtgatttctgcatttccaactgaggtacctggctgatctcatttggactggttggacagagggtgcagcccacagggggcaagccaaagcagggcaggacatcacctcacctgggaagaacaaggggttggggaatttccctttcctagccaggggaagctgggacagactgtacttggaaaaatgagacactcccacccaaatactgcacttttcccaaggttgcagcaaccagcagagaagaatattctctcctgtgcctggctcagcaggtcctgcagtcacagagtcttgctcactgctagcacagcagtctgaggtcaaaggtgacacagcagtctggttgggggaagggtttctgcctctgctgaggcttgagtagctaaacaaagtagctgggaagcttgaactgggtggagcccactgcagctcagcaaggcctactgcctctatagactccaactttgtgggcagggcatatctgaacaaaaggcagcagacagcttctgcagacttaaaagttcctgtctgacagctctgaagagagcagtggttcccccagcatggggtttgagctctaagaatggacagactgccacctgaagtcaatccatgacccctatgtagcctaactgggagacaccccccagtaagggccgacagacacctcatataggtgggtgcccttctgggacaaagcttccagaggaaggatcaggcagcaatatttgctgttctgcaataattgccattctgcagcctccactggtgacacccaggcaaacaggttgtggagtggacctccagcaaattccaacagacctgcagctgagaaacctgactgtcagaaagaaaaccagcaaacagaaaggaatagaagcaacatcaacaaaaaggacatatacaccaaaaccccatctgtaggtcaccaacttcaaagaccaaatgtagataaaaccacaaaggtggggagaaaccagagcagaaaagctgaaaattctaaaaaccagggcacctcttctcgtccaaaggatcacagctcctcaccagcaatggaacaaagctggatggagaatggctttgaagagttgacagaagtaggcttcagaaggtcggtaataacaaacttctctgagctaaaggagcatgtacaaactcatcacaaggaagctaaaaaccttaaagaaagggtagacgaatggctaactagaataaacagtgaagagaagaccttaaatgacctgatggagctgaaaaccatggcacgagaacttagtgatgcatgcacaagcttcaatagctgattcaatcaagtggaagaaagggtatcagtgattgaagatcaaaataatgacataaggtgagaagacaaggttagagaaaaaggagtagaaagaaatgaacaaagcctccaagaaatatgggactatgtgaaaagaccaaatctatgtttgataggtgtacctgaaagtgatggggagaatggaaccaagttggaaaacactcttcaggatattatccaggagaatttccccaacctagcaaactgggccaacattcaaattcaggaaatacaagagaacaccacaaagatactccttgagaagaacaaccccaagacaaataattttcagattcaccatggttgaaatgaaggaaaaatgttaagggtagccagagagaaaggtcagcttacccacaaagggaagcccatcagactagcagcagatgtctcagcagaaatcctgcaagccagaagagagtgggggccaatattcaacaatcttaaagaaaagaattttcaacccagaatttcatatccagcaaaactaagcttcataagtgaaggagaaataaaatcctttacagacaaggaaatactgagagattttgtcacgaccaggcctgcttacaagagctcctgaaggaagtactaaaaatggaaagaaacaacctgtaccagccactgcaaaaaacatgtcaaattgcaaagaccatcgatgctatgaagaaaccgtcaattagcaggcaaaataaccagctaacttcataattacaggatcaaattcacacataacaatattaaccttaaatgtaaaagggctaaatgaccaattaaaagacacagaccagcaaattggataaagagtcaagacccatcagtgtgctgcattcagaagaccgatctcacatccagagacacacataggctcaaaataaagggatggaggaagatctaccaagcaaatggaaaacaaaaaaaagcaggggttgcaatcctagtctctgataaaacagactttaaaccagcaaagatcaaaaaagacaaagaaggccattacacaatggtaaagggatcaatgcaacaagaaggttaactatcctaaatatatatgcacccaatacaggagcacccggattcataaagcaagtcaccagagacctacaaagagacttagactcccacacaataataatgggagactttaacaccccatggtcaacatcagacagatgaacgagacagaaggttaacaacgatatccaagagttgaactcagctctgcaccaagctgacctaatagacatctacaaaactctcaacaccaagtcaataaaatatacattcctctgagcacaacatcacacttattctaaaattgacaacataattggaagtaaagcactcctcaacaaatgtaaaagaacagaaatcacagtaaactgtctcttagaccacagtgcaatcaaataagaactcaggattaagaaactcactcaaaactgcacaactacatggaaactgaacaacctgctcctgaatgaccactaggtaaataatgaaatgaaggcagaaataaagatgttctttgaaaccaatgagaacaaagacacaacataacagaatctctgggacacatttaaagcagtgggtagagggaaatgtatagcactaaatgcccacaagagaaagcaggaaagatctaaaattgacaccctaacatcacaattaaaagaaatagagaggcaagagcaaacacattcaaaagctaacagaagacaagaaataactaagatcagagcagaactgaaggagatagagatgcaaaaaacccttcaaaaaatcattgaatccaggaggtggttttttgaaaagatcaacaaaattgatagactattagcaagactaataaagaagaagagggaagaatcaaatagatgcaataaaaaatgataacggggatatcaccacttatcccacagacatacaaactaccatcagagaatattataaacacctctatgcaaataaactagaaaatctagaagaaatggataaattcctggacacataaaccctcccaagactaaaccaggaataagttgaatctctgaatagaccaataacaggttctgaaattgaggaaataattaataggctaccaacaaaaaaagtccaggaccagatggattcacagctgaattctaccagaggtacaaagaggaggtggtaacatttcttctgatactattccaatcaataaaaaaagacagaatcctccctaactcattttatgaggccagcatcatcccgataccaaagcttggcagaaacacaacaaaagagaattttagaccaatatccctgatgaacattgatgcaaaattcctcaataaaatactggcaaaccaaatccagcagcaaatcaaaatgtttatccttgacaatcaagttagcttcatccctggaatgcaaggctggttcaacatatgcaaatcaataaacgtcatccatcatataaacagaaccaacgacaaaaaccacatgattgtctcaatagatgcagaaaaggcctttgacaaaattcaacagcccttcatgcaaaaactctcaatcacctaggtattcaaggaatgtttctcaaaataataagagctgtttatgacagaaccacagccaatatcatactgaatgggcaaaaactggaagcattccctttgaaaactggcacaggacagggatgtcctctctcaccattcctattcatcttagtgttgaaagttctgggcaatcaggcaagagaaagaaataaggcgtattcaattaggaaaacaggaagtcaaattgtccctgtttgcagatgacatgattgtatatttagaaaacctcatcatctcagccccatgtctccttaaggtgataagcaacttcagcaaagtctcaggatacaaaatttttcaatgtaaaaaatcacaagcattcctatacacaaataacagacaaacagagagccaaatcatgagtgaactcccattcacaattgctgcaaagagaataaaatacctaggaatacaaattccaaggaatgtgaaggacctcttcaaggagagctacaaaccactgctcaatgaaataaaagaggacacaaacaaatggaagtacattccatgctcctggatgggaagaatcaatattgtgaaaatggccatactgcccaaggtaatttatagattcaatggcatccccatcaagctacctctgactttcttcacagaattggaaaaaaactactttaaagttcatatggaaccaaaaaagagccctcattgccaagacaatcctaaccaaaaagaacaaagctgaaggcatcacactacctgacttcagactatactacaaggctacaataaccaaaacagcatggtactcataccaaaacagagatatagaccaatggaacagaacagtggcctcagaaataacaccacacatctacaatcatctgatatttgacagacctgacaaaaacaagaaatgaagaaaggattccctatttaataaatggtgctgggaaaactggctagccatatgtagaaagctgaaactggatcccttccttacaccttatacaaaaattaattcaagatgatttaaagatttaaatgttagacctaaaaccataaaaaccctagaagaaaacctagacaataccactcaggacataggcatgggcaaggacttcatgactaaaacactaaaagcaatggcaacaaaagccaaaatcgacaaataagatctaactaaactaaagagcttctgcacagcaaaagaaaataccatcagagtgaaaaggcaacctaaagaatgagagaaaaattttgaaatctacccatctgacaaagggctaatatctagaatctacaaagaaatcaaacaaatttacaagaaaaaaacaaacaaccccatcaaaaagtgggcaaaggatatgacagacacttctcaaaagaagacatttatgcagccagcaagcacatgaaaaaatgctcctcatcacttgtcatcatagcaatggaaatcaaaaccacagtgagataccatcttatgccaattagaatggtgatcaaaaaagtcaggaaacaagattctggagagaatgtggagaaataggaacacttttacactgttggtgggagtgtaaattaattcaaccattgtggaagacagtgcagcgattcctcaaggatctagaactagaaataccatttgacccagcaatcccattactggatatatacccaaaaaattataaatcatgctgctataaagacacatgcacacgtatgtttattgcagcactactcacaatagaaaagacctgtactcaacccaaatgtccatcaatgataaactggattgagaaaatgtggcacatatacaccatggaatactatgcagccataaaaaagtatgagttcacgtcctttgcagggacatagatgaagctggaaaccataattctcagcaatctatcacaaagacagaaaaccaagcatcatatgttttcactcataggtgggaattgaacaatgacaacacttggacacagtgtggagaacatcacacactggggcctgtcgtggggtgggtgccaaggggagggatagcatgaggagatatacctaatgtaaatgacaagttgatgggtgcagcaaaccaacatggcacatgtatcaaacctgcatactgtgcacaagtaccctagaacttaaagtataataataaaaaaaatttgtaaaaatctcacttcatgtttaaactggttaagattaaatagaattatctataaggtttcattaaaattggggttaacattaatagtaaactaatgcaaggggaaaatttggctttttctttttaacaggatttttatgtagtagtaagggccaataaaagatttttgctttttcaaatttttaattcttcatgttggcaaaacaaatagcttatggtaatctaaaattctattccttaagattaactgttttagacctctaacatatttaagaaggtccccaaaatcaaacttcagtctcaaaggttgtctttcctgatgcatggctttttggtgctacaaagagcccctaaagcattcaaaagaaaggcaaacagaattattgaacatgtttaggtacatgggattgtcaaaatgatgtcttttttttcagtttatatttaagtatataatattgacatatgttccaaaactatatggggtgtctaaggttctaatgtctaaatatgtgctaccaatcaaaattaaggttgttatgttgggttattgtaaactacaaagataaccaaatttttttgtcagtcgtgtttctaactgtaaccctggatattttgtcattggcagacaattttcttgttttaatcctcttaaaaatggtttataatcagctgtgggactttaacaggtgctctcaaatgcagatttctgataacagataaaagtacagaactcataaaaagctaaaatgtttatggatatcaagcagaacaaagttaatagaatggatttagctaatggaaaactaaagcaatgcttttaacttttgcttaaagcattgctaattcttattttgtttttcagagtcagaaaaactttcttaaaagttttaaaccactgagcaaggtatactgcttaaacataatttggaccttgtctgtttctttttgcctggttctgctaaaaataaaaaactatttataagtattctttttttaaattttttaaattacactttaagttctagggtacatgtgcacaacatgcagttttgttacatatgtatacatgggccatgttgttgtgctgcacccattaactcgtcatttaacattaggcatatctcctaatgctatcccttccccctacccttaccccacgacaggccacagtgtgtgatattccccttcctgtgtccaagtgttgtcattgttcaattcccacctatgagtgaaaacatgcggtgtttggttttctgtccttgggatagtttgctcagaatgatggttcccagcttcatccatttccctacaaaggacatgaactcatcctcttttttggctgcatagtattccatggtgtatatgtgccacattttcttaatccagtctatcattgatgggcatttgggttggttccaagtctttgctattgtgaatagcagcacaataaacatacatttgcatgtgtctttatagcatgtgtctttatagcagcatgatttataattttttgggtatatacccagtaatgggattgctgggtcaaatggtatttctagttctagatctttgaagaatcaccacactgtcttccacaaaggatgaactagtttacagtcccaccaacagtgtaaaagcatttctatttctccacatcctctccagcgtctgttgtttcctgactttttaatgatcaccattctaactggtatgagatggtatctctttgtggtttggcttgcatttctctgatggccagtgatgatgagcattttttcatgtgtctgttggctgtgtaaatgtcttcttttgagaagtgtctgttcatatcctttgctcactttttgatggggttgtttgattttttcttgtaaatttgtttaagttctttgtagattctagatattagccctttgtcagatgggtagattttaaaacttttctcccattctgtaggttgcctgttcactctgatggtagtttcttttgctgtgcagaagctctttagtttaattagatctcacttgtcaattttggcttttgttgccattgctttcggtgttttagtcatgaagtccttgcccattcctatgtcctgagtggtattgcctaggttttcttctagggtttttatggttttaggtctaacacttaagtctttaatccaccttgaattaatttttgtataaagtgtaaggaagggatccagtttcagctttctacatatggctagccagttttcccagcaccatttattaaatagggaatcctttccccatttcttatttttgtcaggtttgtcaaagatcaggtggtggtagatgtgtggtgttatttctgaggctctgttctgttccattggtctatatctctgttttcatactagtatcatgctgttttggttactgtagccttgtagtacagtttgaaatcaggtagtgtgatgcctccagctttgttctcttggcttgggattgtcttggcaatgtgggctcttttttcgttccatatgaactttaaagtagtttttttttccaattctgtgaagaaagtcagaggtagcttgatggggatgacattgaatctataaattaccttgggcagtatggccattttcacaatattgattcttcctatccatgagcatggaatgtacttccatttgtttgtgtcctcttttatttcattgagcagtggcttatagttctccttgaagaggtccttcacattccttggaagatgtattcctaggtattttattctctttgtagcaattgtgaatgggagttcacttatgatttggctctctgtttgtctgttatttgtgtataggaatgtttgtgatttttgcacactgaaaaattttgtatcctgagagtttgctgaggttgcttatcagcttaaggagatgtggggctgagatgatgaagttttctaaatatacaatcatgtcttctgcaaacagggacaatttgacttcctcttttcctaattgaataccctttctttctctcctgattgccctggccagaacttccaacactaagttgaataggagtggtgagagagggcatccttgtcttgtgccagttttcaaaaggaatgcttccagtttttgcccattcagtatgatattggctgtgggtttgtcataaatagctcttattattttgagatacgtcccatcaatacctagttgattgagagtttttagaatgaagggttgttgaatttttgtcaaaggtcttttctgcatctattgagataatcatatggtttttgtatttggttctgtttatatgatggattaagtttatgatttgtgtatgttgaaccacccttgcatcccaggggtgaagccaacttgatcgtggtggataagctttttaatgtgctgctggatgcggtttgccagtattttattgaggatttttgcatcagtgttcatcagggatattggtctaaaattctctttttttgttgtgtttctgccagactttggtatcaggatgatgctggcctcacaaaatgagctagggaggattctgtctttttctattgattggaatattttcaggaggaatggtaccagctcctctttgtacctctggtagaattcagctgtgaatccgtctggtcctggacttttttttattggtatgctatcaattattgcctcaatttaagagcctgttattggtctattcagggattcaatttcttcctggtttagtcttgggagggtgcatgtgtccaggaatttatccatttcttctagattttctagtttatttgagtagagctgtttatagtattttctgatggtagtttgtatttctgtgagattggtggtgatatctcctttatcattttttattgtgtcgatttgattcttctctcttttcctctttattagtcttgctagccatctatcaattttgttgatctttttaaaaaaccagctcctggattcattgattttttggagggttttttgtgtctctatctccttcagttctgctctgatcttagttatttcttgccttctgctagcttttgaatgtgtttgctcttgcttctctagttcttttaattgtgatgttagggtgtcaattttagatctttcctgctttctcttatgggcatttaatgccataaatttccctctacccactgctttaaatgtgtcccagagattctgttatgttgtgtctttgttctcactggtttcaaagaacatctttatttctgccttcatttcattatttacccagtagtcattcaggagcaggttgttcagtttccatgtagttgtgcagttttgagtgagtttcttaatcctgagttcttatttgattgcactgtggtctaagagacagtttgttataatttctgttcttttacatttgctgaggagtgctttacttccaactgtgtggtcaattttggaataagtatgatgtggtgctgagaagaatctatattctcttgatttggggtggagaattctgtagatgtctattagatctgcttggtgcagagctgagttcaactcctggatatccttgttaactttctgtctcattgatctgtttaatggtaagagtggggtgttaaagtcttccattattattgtgtgggagtctaagtctctttgtcagtctctggtgacttgctttatgaatccgggtgctcctgtattgggtgcatatatatttaggatagttagctcttcttgtttaattgatccctttaccgttatgtaatggtcttctttgtctcttttgatctttgctggtttaaagtctgttttattagagactaggattgcaacccctgctcttttttttcctctcatttgcttggtagatcttcctccatccctttattttgagcctatgtgtgtctctggatgtgagatgggtctcctgaatgcagcacactgatgggtcttgactctttatccaatttcccagtctgtgtcttttaattggagcatttaacccatttacatttaaggttaatattgttatgtgtgaatttgatcctgtcattatgttagccggttattttgctcattagttgatgctgtttcttcctagcatcgatggtctttggaatttggcatgtttttgcagtggctggtaccagtttttcctttccatatttagtgcttctttcaggagctcttgtaaggcaggcctggtagtaacaaaatctctcagcatttgcttgtctgtaaaggattttatttctccttcacttatgcagcttaattttgctggatatgaaattctggttgaaaattcttttctttaagaatgttgaatattggcccccactctcttctggcttgtagagtttctgttgagagatccactgttagtctgatgggtttccctttgtgggtaacccgatctttctctctggctgcccttaacattttttccttcatttcaactttggcgaacctgacaattaattgtcttggagttactcttctcaaggagtatctttgtggtgttctctgtgtttcctgaatttgaattttggcctgccttgctaggttggggaagttctcctggataatatcttgaagagtgttttgcaacttggttccattctccccgtcattttcaggtacaccaatcagacatagattaagtcttttcacgtagtctcgtatttcttggaggctttgttcatttctttttactcttgtatctctaaacttctcttctcacttcatttcatttatttgatcttcaatcactgataccctttcttccacttgatcaaatcggctcctgaagcttgtgcatgcatcacgtagttcttgtgccatggttttcagctccatcaggtcatttaaggtcttctctatgctgtttactctagttagctctcttctaatcttttttcaaggtttttagcttctttgcgatgggtttgaacatcctcctttagcttggataaggctgttattattgatcatctgaagccttctctcaactcatctaagtcattttccatccaccttttttccattgctgatgaggagctgtgttcctttggaggagaagaggtgctctgatttttagaattttcagcttttctgctctggtttctccccatctttgtggttttatctacctttggtctttgatgatggtgatgtacagatggggttttagtgtggatgtcctttctgtttgttaattttccttctaacagtcaggaccctcagctgcaggtctgttgcagtttgctcgagttccactccagaccctgtttgcctgggtatcaccagcggaggctgcagaacagcaaatattgcagaatggcaaatattgctgcctgatccttcctctggaagcttcatctcagagggccacccagctgtatgaggtgtcagtcagccactactgggaggtttctcccagttaggctactcgggggtcagggacccacttgaggaggcagtctgtccattctcagatctcaaactctgtgttgggagaaccactactctcttcaaagctatcaataggaacgtttcagtctgcagaagtttctgctgccttttattcagctatgctctgcccccagaggtgtagtctacagaggcaggcaggcctccttgagctgcggtgggctccacccagttcgagcttcccagccactttgtttacttactcaaacctcagaaatggcacattcccctcccccagcctcactgccaccttgcagttttatctcagactgctgtgctagcagtgagcaagtctctgtggttgtgggaccctgcaagccaggcatgggatataatcttctggtgtgctgtttgctaagactgttggaaaagcacagtaatagggtgtgagtgtcccaattttccaggtacagtctgtcacagtttcccttggccaggaaagggaattccccaactccttgcacttcccaggtgaggtgatacacttccctgcattggctcacactccatgggctgcacctactgtccaacaagccccagtgagatgaacctggtagctcagttggaaatgtagaaatcacccatcttctgcatcgctcacgctgggagctgtggactggaactgttcctattcagccatcttggaacctctatcaactagttgtaagtattcttaacttgcaacaatatagttgtttgcatcaatgaaacaaaaatcctttttctattttttctttcttttgaaacatagtctcgctctgtctgtggctggcatgcagtggcaaaatcttagttcactgcaacctctgcctcccaggttcaagtgactctcccacctcagcctcctgagtagccagtactacaggtgtgcaccaccacggccagctaacttttgtatttttagtagatatggggtttcacaatgttggccaaggtggtcttgatctcttgatctgcccacctcaggctaccaaagtgctgtgattacaggcatgagccaccgtgcccagctgaaaaatccattttcttatgcagtgaaacacaatagaaaaatgctagttctttagcaaggctttaactggaagggtgtgttttcctttaagaaatcaagtttaagttgcaaagccagtaacagcctcttgggaaagctggtctcatacctgtagtctacacagttctcatacagaattcctggcctgtggtgagtaaaaaaatgtctctttctaacagactcagaaacactatgatcttgggacctcaaaaatacaggaatttacccaattcacaaatatttaagggtacaaatccatggcttagcccagctttagaaagtcctatctaagatttcttttggaacagagttccatcaaagcttatgaaaaaggcctatggagagatagttactcttgctgcactatgttcaaataggccaagtataataataaagtctattttgcaaacaattcagtctattgtgagttgtttttaactaaagaaaatctaaaaacaaaatcatgtttcaaagcttaccatacatttctcatgaacttctagtctcattgattgttttagagtttttgatgacgttttaaactaaccctgcttattcctgtaagccaaccagcaatctctgcctgcagctcagaaaacagaaagggaagggtaatgtaaaaatctaaatcaatatgctagttctgagcaattattctgtaaatccagctggaaataaataaggtgccaataacccagaggtttcttttatcagaaagtaaaatcaaaggagctaaccaaagccaagcctcatgcacccaaatcttagcaaacataactatagctaccaggtatcagggtgtgtcaacagcctcaacatttttaggcttttcctaccccccttaattcatttcaatgcctctcctctactaaaccagattgtttctttttgccttaaaaactatcaagctctaagtggtaatgcaaatggaatgacgcataaacacatgtttcttctgaggacaattaaactagccatggaagaagtcctagctgctgttttctacacagcacccctttccagcgaggaatagccaaaaatatcaatgcctcttctccctaacagcagttagggtctccactcctgaggaggaactgagagggattagctagctagcctaaggtagacagcaagggaagggtccctggagagcacccaacccatgggtcagtgcatcataactacatatccaccaagcccagcataatggcacacacctgtaatcctagtgactcaggaggctgaggcatgagaattgcttgaacctgggaggtggagggtgcagtgagatcacaccattacactccagcctgggcaacagagcaagactcagtcttaagaaaaaaaaaactcatctttcaccaatattttaatcgttttatgtctgcacacttaagcatcaaggacagggtcctggatgatgataagtgcatatttcaatttataaagtaaaaaatgaccatcagagtctaataaatgatgaatacagcaacatcatacttcataaaatcattccaggtatgtttgacaaacaagaaggttgcataggaccttcttgtgctactcatgtgaagtgctcttctctctcatgttaatctcaactcccaaccttacaaataccacatactcacatatacagaaaaagaaaaattaacttattttcataggaggctgtgattcacattttattctattacatcttttccacattgctgttacaatactgttgaagtgcaccctctttcaccagaagaatacttttgtgaacgtgaatagactgacactggagaagaccagctcagcacactcacttgaatgatccctttgcttttcaggcagtaaaaatcggggagtgaaaataaagtgactgcggattaagcaaagagttatacatggaaaaacatttgtcaattgtttgaagattacattgcatggtctacaacttttaaaatataaaatgcatagcataaatgttgcacaagaaagtagaataaaaatgatggagttggccacaaaggatagctaaagctgtactatagcaatatagaaaaatacatatttactgtcagaagaaggtaacttgaagtatttgaaagatgttctctaagaaactaaaactatttttagttttagattctgtaaaaaatgtttcttaagcatttttaattttcaaaaacatttgagtgcatttttgtcagcttagtttctctgaagaatttaaatataataaagtaatacatattaaaaataacttttctggcaatagagcagcttaatttttagattaaaaaagtaaaattttacacaattttatgctgaccaatttaatcaaaagcttctttcttacaacttggagaaatgacacaaagactcaacttttatgttgggtgggagagaaaatgattaccaggggctagaaacttgtttcactaatcaatgttgatttttattgctatattgtctcaaattatgttaataataaaataatggccttgatccaaaaaattttttacaaacttattgcttcaatcagccaaaatattaaccaaaagaaggcatagaaatagaggtatttaacagtcataatttatagtataaaattaaaatgtttctagaaataaagaaagatatataaacaaataagaaaaggaaaaaaagtggattcctcacaataggtagggtgtgaaatcaacataagggttcatcaacagttgaatgaattttaaaaagtggtatatttacacaatggaatgctctttattccttaaaaagaaagaagtcttggaggtgggctcagcagtctgtgtctcagcaagccttgcagaaattctgatgcacactgaagtttgagcgtcactggaatggacagtgtccaaatgattgctgggtcaccccacctatcctgaatgtcaggaacatcccgagtgagactagtcagtacattgtagctctttctccagccacaaccagaaagtctttgcttcccctttgccttccaccatgattgtaagtttcctgaagcctctccagctgtgcgaaactagaaaaagatgcacacccaaaagccccatttgaagcttctagacagaaagccaagcatttggagagtgtctttggacagttttaaacacaactgtggaaaagaaagcagccctactcagtgtgaagatgatgagaatgaagacctttatgatgatctacttccacttaataaatagtgactttagaatccttaacacagcactcagctaccaatgccaatgaataaaattttgcatcactgttgaaatctgttcaccactccttttgtagatgttctgagttgggtaccagaagtcaattatctcattattaagatggcttctaaggtgattcatttttgtgacacataatgagtgttagttgaggtctagctgtatgctgaaaaatgctgatgaaaaatgttgtctacagagaggatagtcaacttatattaactgtgagttatactaggagctatacttaattcatttagactttatttggtcagctttttttatatttcataaaaagaagaaagattaaaaaaagaagtctttttaaatatatattctgctcaaatcaccatttccttttttttctgattcaaaggactttttcaagatctttcagggattatattttctttcaccttctatctgcattctctttcttcagccaattgattaaaaaagagatgcagagaagacacatttgcttctcatccacacatcacttccacttgctattagtcattgtgagtagagctgagaatagcagctttctagcatgacagcaacttctcagaaaaaagcaacactcggaaacaaaactataaatcttttcaaaagctaatgtattttaagcaaaataagcagatgcatcaataataaaatgcttgtggtagaatcgatttattttgttgatttctattgagttcagataagatttgaccaaaagctagcaaatatagagcagaaagaagaatattatctgaaatcagaatatggtaaatgaagttaatttgtcaaaagaaataagaatattatgacctcatgctaatagtctcatctatggttgtaaaacatcaaatgctactttttattataaactgtagttcatataagtattccatttatatcaccctctttcactatttcaatgtcttctccactttgtatcagtggaaaacaggtcagctgcttccaggaaagcaggcaatgctcttcttactttaacaatgatgatgaagagcacttgttttggtgatactcccatgccaaaaactgttattttgcctgaagtactctatatttgttaataaaataaaattattaaccaagaggaatttatccattcaagttttatggaattttggttacatttaagtgtctctgactttcgtggaatattgaaatttttatgaatctaaatagagtactataaataaccttttactaaaagactttttgaagtggagtgatatttataaaaacttttcatagcattgaagaaatgttttaaccatgttcccagtaactactctgagcacagaattttccatttttagaattcgctctgagtcactcaggggaaattgatatctttacgaatgggcaaaaaaaggtgctgagtggaggtgcaacacattgcacatcaatgcttttcacatgcaactactagggtcttaatttgattgaactctcatttgcatagctagacacttactgaatctagtcatactattttttggcaactaatgccatgtttgttacccattagttttatacacttatttgcttggctgaaaaaacttaatcttctcttaatttactctaaattgagagactagatttacagtctgggtctataatagtagttgaatgtttttaatactattcttggcaaattctcatatattcacattcaaaacagatataaattttatgaaaaggagttgacaaaaagtaaaaaatttcaaataggttaagtaagttttgagatctattgcacagcagggtaactatagtaaactataaactattccatatttcagaataactaagagtaaattccaaatgtaccaccacaaaaatgataggtaagcaagttcatagatatgttattaaatgaaacttaattattcaatattttatacatatactaaaacatcacattgtatcccataactttatgcaactgtgatttgccaatcaaaaatactaatacattttttaataagaaagagtgaaataagctttaaaatattgcaccagagaaaaatgtggctgttaatcttaaaattttaggaaacatatacatatatgtatattttatttcaaatggcttgctcatttacagatgtaggtaagtaaacttttaatatcatgaacagtcagaacccagcactcagaaataggctgttgatttttaatgttcaaaataatatagtactttaaaagacagactctaaagcaactgtttacagtaaaattctaagtttttaaacaaatgatttccttcacttgttagaaaaaaattttaatatatatttttaaactatattgaaatttatcaaattaacataaatttattaaacaagtaaaaaaatgtgccttcttgtctctaattataaaactgacagagactctgcatttaaccaaatactttggtaaatggattttaacaatgatatctctcatgacttaaaacagccactagttttaatttagaagtatattaaatttttatattaaaatctaggattagtctattattacatagaaaatttgtggtctgcatgtacatcatcatccattgaatggtccacagtttctgagtttcagaaatgttaatataagaatacttcttctgattgaataatttaagttttctcagtaactaaaaaagattggaattactgatcactcacttataatgtggttttaaatgttatttaatgaagatatataaagtttcttttaaaatcattttaacaacatatttctcttgcttttcacttttattagaaaataagtatgaaaatttatgttaccacaagactataaattttatttaaatctagacataatgctaatcttaaaagatctgtatgtttaagattatggataaccaatttacacttaaaagataaataactgctttccagtaaatcaaatggggcaattttgactctcaattataagctattaaaatattaatactatcacctatgtggaaattttaggtatctgcatgttcatgttttttagcatataataaatcagaaactataaatttttataaactataaataataaactaaaaatttaaagtatcactttttgtcagttttgaaatactgtcattatttctaggtgatataacactcaattacagaggctgtggctgttgaaattagaaatgtcatggttgattcttctttacttgctgcctttttatttcacacaaactcagcagcacaaggaaggcaagaaatgctacaccttgattgcaaacacaccagtgcctttcaaaggagaataaatgtctgagcatattctcttgaaattcatggcatcttttgctcaagtacagactttcatatggaaaataataaagacaataatttcacatggcaatagcataagaaaagtactctaaaaataccttctgacccattatttctatttttcacaagaatgattgtgatggaatgagcatttgcagcactgtggtcataaataacccccactttctgttgaattatttttggaatgtgactataagacttttgtgctttttttttggaaaaaatattttatatttctaattcagtgatttagcataatttttagtctcacactttcaaaaatagttcattctgaaaaaaataagactaaaccacttaccaccttttcccccaaaagagtaacaaattaaatctatagtctactgcacagttaatacataaacgataaaggtgtaatttgttttacctgcacacttgaaaataaaacactttttgggctatagaccaagaactttcagagaggttagcttataaaatgtgaggagacctggtatagaaacattcaccactatgccttaaggggtgaaaatttgtctttcacccctaatttcaaccattaacccagagctggaaaaatagaacatgtcattataccaaaaagcattttattatttttattttatatttaaggggtacatgtgcagattcgtaaaacaggtagactacatgatattgaggtttgaacacttaattattccattgtctgagtagtttacatcatacctaagccaattttcaatgcttgtcacccttccttctcttattgttttcatctttgtttccatgtgcgcccaatttttagcgtccatgtatgagtgagaacatgtggcatttgtttttctgatgcatcagtttgcttagaataatggccttctgttgcattcatgttgcggcaaaagacattacttcattctcttccattgctgcgtagtattggaggttgtataagtacatcatttttcttatccaataaaagattcatgggcaactggtttaattctgtttttgctattgtgaatagtgttgcaatgaacatgtgagtgcttgtgtctctttggcaaaattatttattcttttttggggcagatacccactaatgggctagattagtcaaatggcaattctatttctagttctttgagaagtctccaaactgctttgcacaggccctgaattaatttgcattcccaccaacagtgtagaaagattttcttttctctgcaactttaacatcttatttatcttacttttaataacagtcattcttactggtgtgaaatggtatcacactgtcactttgatttacatcttcctgataattaggaatgttgagcaatttttacatgtttattggcagtgcttatgtcttcctttgagaagaagctggctattcatatcatttgtttgcttttttattaaatggtttatagattctgcatattaatccttcattgtcggcagtttgcaaatattttatttcatactgtaggtcatctgtttactttgttgatagtttctttcactgtgcagaagttctttgccttaattagatgtcattttttatttttatttttgtcgcactcatgttcatgttagtcataaattctttagagaggccaatattttctaagtgttcttctaagaattttgtagcttgaagactcacagatcaagtctttaatttatgttgttatttttttatatagaaaaaggtaggactccagttttcttccacatatgactaacaagttttcccagtattatttactgaatagggatttaattctgttggctttgtaaaaataacctggttgtaaagtatagcttaattcaggactgtctcttccatttcattggtctatatgtatatttttgtaccagaatcatgttatactggttactctgatgcaatcttggctcactgcaacctccacctcccagttcaagtggttctcttgcctcagcctcccaagtagctagaattacaggcatgtgccaccacatctggctaattttttgtatttagtagagacgcaggtttcaccgtgttggccagggtggtctcaaacttctgacctcaggtgatccatctgtgtaagcctcccaaagggctgagatgacaggcatgagccaccacactcagcccagatttattcttttagtttgaagttgtcttggctatttgagctctttaattcttttgtatatattttagaatagttttctttttctaattctataaaaaagcatcatggatagtctgataaaaatagcacttaatctgtaggttgctttagtcagaatgaccattttaattatattctttgaatccatcagcatgcaatatttttccatttatttgcattctcgctcatttctttcagcaatgttttcttcttctttgtacagatattttagctccttgatttaatgtatttcttgttttttttttttgtttgtggctattgtaaatagagctgtgttttttattttgttctgtttgaatattattggtgtatagaagtgctatgcatttgtgttgattttgtattctgaggtttttttggagtcttttttcaggcttcagagtcttctggtgaaatctttaaagtattctaggtagacaattctatcatcagtaaagataacttgactttgttttctgtttggattccttttatttctctggctaggacttcgtaacttcaataggactgtttagaatggatattcttgtcttatttttattcttatggagaatgctttcagtttctgcttttttagtatgatgttggctaaggatttgtcatagatgactcattattttggggtatgtttcatcaatgtctagtgtgttgacaatatttttatgagtcaatattggattttcttgaatgccttttctgccccattgtgttaaatattttttattttatttttacatggtgatcatacttattgacttgcatatgatgaaacatctttgcatttatggaataaagttcacatcattgtagcaaaataactttctgatttgcttttgaattcagtttgctagtatttcatggaggattattgttccaatattcacccagaatattgaactgtagtttctgtttttgttgtgtcttcactagattttagtttcatgtatttcactgatttcatataattagttagggtgaaatcccaccttgattttttggaatacattcagtaggcttaggaccagcttatcttcgtatatgtggtaaaacttgtctgtgatttcatatgatccagggctttttatgattagtaggtctattattacttattaaatgtcattatacatcttatacatttttgttgttaaagattgctgttattaggccaggtgcggtggctcaggcctgtaatcccagcattttgggaggacaaggtgggcagatcacgaagtaaggagatcgagaccatcctggctaaaatggtgaaaccccacctctactaaaaatacaaaaaattagccgggcttggtggcgggagcctgtagcccagctaattgggagtctgaggtgggagaatggcatgaacccatgaggcagagcttgcagtgagccaagatcacgccactgcattccagcctgggtgaccgagtgagactccatctcaaaaacaaaacaaaacaaaaacaaacaacaacaaaacaacaaaaaaaaagacttctgattttctggttcaatcttgagaagttttgtgcatccgggagtttatctattttctctaaatcttctactttgcatgcatgttcatagaagtctctgagaatatttttaaatctatgtagaattagatgtgatttcacatctctaacatttaaataaatgcagaataagagttaaacaaaattcaacattccttcatgataaatttctgaaaaaagtaggtataggacaaacgaacctcaagccaataaatgccacatataacaaacaaacaaaaaaaagcacagctaataacatactaaacagggaaatcttgtaagcttttactctaagagcaagaagacaaaaatgcccactttcttcagtcttattaaacatagtatgaactatccaagacagaaatattagaaaataaaatcaaagtgctgagattagaaaaattgttaaattattcctttgcaattttttatttctatacataatcttaagtaaacaaaagcctaagacattactaaaaattagtaggactaataaacaaatttattgaactttcagaatacaaaagcaacatccaagtgtcagtagaatttctatatattgacaactatctctaaatgaaatgacagaaattaatacacaattggaaaatattactcctttataaattggcattactaatattgttaagcatctgtattatacaaaatgatgtacagatataatgcaacctctatcaaaataccagtgatataattaacaaatttaaaaaactacatctaaaatttatagggtaccacaagagaacctgaatagccaaagcaaccaagccgtagaaaaagtgaaggtatcactacctgactttgaaatatattaaaagttttagtaaaaaaaaaaaaaaaaaagtacggtacttgcacaaaaacagacacacaggccagtagagaagaaaaaggagactaaaatatactgatgtatttacagccatctgctttttaaataaaggtggcaatttcttagggaaaaggcagtatcttcaataaatggtgttgagaaaactttatatccacatgcagaggaatataataagaccctcaactcacaccatatataaataaattagatatttaaataaaataaaaacacaaaataaatttgatacttaaatgtaaggtctaaaactctgaaactactacaaaaaataaagactgaaagccctgtaacattggttgggcagtgacttttaaaatttgacctcaagtctcaaggagcaaaatgaaaaaaatagatcaatcagattatttaaattaaaaaactgctgcaaagaacataatacaatcaacaggatgagacaaccaaaaaatggaaggaaatatttgcaaatcataaatgtgacaagggattaatatcaaaactatgtaacaaactcaaatgactatagaacaaaaaacaagtaactattaaaaatgagaaaaaggcttaaatatttttcagaaaaagacatacatatggccaacagatatatttttaaaatgctcaatgtcaattattatcagggaaagacaagcaaaaaaaaaaaagaaaaacgatgagatatcaactcgcttctgttagaatgactctaattaagaagaaaacgtgatggtagaaatctgaagaaaagaaaatgcttgcacactatttgtttgaatgtaagtgaggacagccattatgaaaaacttaatagagttttcttaaaaaacttaaaaatcaaactaccatataacaattgcaccattgtatatccaaaacaaatgaaatcagaatgaagaaacatttgcacttctaggttgtttgcagcactcttcacatgtaaaatatataaaatcaacagttcaacatctaatgagtaaataaagacaatgtggtagatatatacaatggaatactattcatctttaaacaacaaaaattctgttattttcaatcacagggattaacctggaggacattatattagttgaaataagcaaggcacagaaagattcatgtctcatgatttcacttacacgtggcttctaaaaaagttcatctcattgacgtagagagtaaaatggtgaccaccaagtgccaaggtatttagaagaaataggggcattgaaagatgtctgtcaaagaatatataattatacttggataaaagaaataatttccagagatttattgtacagcatggtgactatagttcataataatgcatttgtatttttgaaaaatgcttacaatttcatgttgtctaaccacaaaaatgttaccaatatgagacaaagcattaatcacatagaactaagcatttgacaatgtatatacacttcaaaatgttgttttataaaataaatattttgtcaagttaaaaatatatttttagacactatagaaggataacaatgttccaaatactgtctgtttcttttataaaacttagcagtatcctatcgtacagtttttcagctgttttgccagtcataaccataggaacgttgatgttcaacagcatgttctgaacccagcacagggcatgggagaagccaatgactttagggcttttattttaagcttgcggcacctggagttactggtgcttatggtaacagtacgaaagacaggaaaagggcaggttgcttatgctcccatgactggccactgtgtgatcacagtaaactggtttgcatgcaaactcacaggaaatgttttaatccaaaagctgccattatctccaaaagttttgagagaaaatgatcaaggagatcgctacacttaggtgaccaacaatataaactgtagactaaacttcagccactaaaatttttatttaaaaagtgagcgatacatttctccaaattgtagtatcaatatggaaaataaatattattccaaatttacaggttattttattgttttgcaacctttaacattcactttaaaatagacaattttgcatggaaatgtaggttgtgctctaagtacatcctaaataactaaatttaaaattgcttacttactattctcttaaaaattgaatctttataatatacatatggtctagcaaattatgtatttgccacactatgtataaaaatctaatatttttcttttacaaagaaacaccatgttgatttaatcctctcttcggtagacagtgtatgtcttttatgttaattaaccaatcttaaagttatactgataagcaaactttccagttaaaaccaatgtttcagtgcattaaaaaataccgatgttctccttaaaacctacaacataccatgtgaaatcgcatggcatgaaaacaacagtgagaaaactgtagccataacacagaaaaaggactgtgatgcatatatggtttgagtgcacttaaaaagacaaaacttagataattaagacgtgaatgaagcatttctctttaaattcagcaagattcagctttgcagcctggaaaaagatgttctgctcacatgaagaatcaatgttatttcttcacaatttgtattttccatctctgacttgaagttacaaacttcagcaggaatatttatgactaattataaagcatctgttacacactgagcactgtcatgtttgtttgctacatttatatataaaagcatccacatgacttatgaagcttccctagtacttactgaaacaaattgactcaataaataaaatttacttttgttacttataaaaagttaagggaacaataactaaagtaagcctatatatggttctcccatagaagctaatggaatgttttaactaaataaaatgtaacaatacacaaattgtggaattatatctaaaaataattttgtttgcatgatgaaattttacaaaaattattcttttaactacaaatcagctcagattaaatacttcataaactataaaacaaaaaaataagaaacaaaaagattatgggtctagcatgagtatcatgcaagtaaaaacaaaatttacatggaaatattctaaatgataagctataagataggtgtataaattgaatacaaagcagagagtatacatttgcttttattttatttttttaatttttgtatttttagtagagacggggtttagtagaggtcaggggtctcgatctcctgacctcgtgatccgcccgcctcagcctcccaaagtgctgggattacaggcgtgagccaccgcgcccagcctacatttgcttttagcatttttgaggatttttgtttcctagtaaattagacatcttattaaatgctttgtggtttcaatattcctcttttctcctgaaaatagttacaaacttacagtcaaacaaacacacttactccttaaacctaagttatatctttagactaatagatgtgtatatttaactctatgtaagtcaaaactaaaactcgattatgtgctttcaggcagaggccacatgtgcaaaaaatacataataaatttttgaaaattattcaggactcagaaatatattgattttatttacacttatttacaatttttatgatgaccataaaaataaccatgtagtcaataacaatttaattgtacaatttagaataactaagactgtagaattggtttgtaatacaaaacataaaagccagaggttataggtaccttatttatcacaatgtgattattatatattgtatgactgtatcaaaatatgccatctatggcataaatgtatacacatattatgtacacacaaaaactaagaaaaatttaaatgtaaaaaaaatttaacctgcaggaaccatattctttaacttatttgcagtttaaagccactgaaaaagaatactagagatgttagtctattatgttaccaaatagtgtattgttaccatcttttaaatatacccttaagtaaggtggaataggttaaaactagtggcataataacactttattgaatgtataacagtatttaacatgttataaatgttgaaataaaaaattaacacataatctaaaactttaaaaatgcaattttatcacataaaagtacaattaataaaatgacatactaatttaattaattttaactataaaatatgttattctctcataatattctctcataatactacattagtacatcacttagagccaggtgcagtggctcacacctattatcacagcactttgggaggccaaggcagacagatcacatgaggtcaaaagttcaagaacagcctggccaacatggcaaaaccttgttttactaaaatacaaaaattagctggatgtggttgtgggcacctgtaatctcagcttcttgggaggctgagacaggagaatatcttgaacctgggaggaggagcttacagtgagctgagatcataccactgcactccagcctgggaaacagagtgagattccctctcaaaaaaaaaaaaaaaaaaaactctgaatgcctacctcatacatcactcaattctataagttaatcacaaatagccttcctacttagattttcatcgtgcatcttacattttaatgtccttagtcatccataagaaatgtcataatgaccatgtaaaaagtctcccaaatctttgatgcagaaagaattgatcacatgcttttatatgggaatacaagagaaattaagaaatagcatgaagcaatttaagagttgaattccgtcattattcagtttccaaataagcttttttttttcttttgagacaatctcattatcacccgggcttcagtgcagtggcaaaatctcagctcactgaaacctctggctcccaggttcaagtgattctcatgcctcagcctcccaagtagctgggactacaggtgtgcaccaccatgtttggctaatttttgtatttatttttagtagacatggggttccaccttgttggccaggctggtcttgaactcctgacctcaggtgatctgcccatcttggcatcacaaagtattggccttacaggtgtaagccactgtgtctggcaaaaaaaaaaaaaaaaaaaaaaaatcggtatttttaagataaaagtatactttaaatgtaaatgtaactcttcaaaggtctacttctttcaaagtcatatacaaataatttttctttttaacaactttagttttggattttttcctatactcagcagtctgatttagtgtaatgtctgaagtttgagagataggtatttctactgtgaattatctatatttacataaacaattttggattaaatatttttatatttactgtatctgcaaaaatatattttagtataaactcttttgtgttttataattctgtagtttttgtaaaaatgtttttccaaatttattaaatttgcacggtcattcaatataaattccctgatgtttagcaaagttggaacaactacctaaggttttcctgtagtacaaaatgtgtacaataaaatctgtgatacaagtaaaggcactacaaccctctttatatttgtaatgtttttcctcaaaataaatattcttctgtattttaagggcttttattttctgaaagatctagtgacaataattgtacttttaatactttatttaatatgaactctctggtgttgaataagatgtgagaagatattagtggcattcacaatttttttttcccagtctctctgttgcccaggctagtatataaatgctttcctttgcaataaggcatgagtattggttaaatgtgtgccacattgtttattctagtagttttctccagtatattatcttacctacaatcaagtgtgacagccatttaaaggctttgtcacattcttcacatttctaggatttctcattcatatgatttcttttatattcagaaaagtctgaggtgttgccaaaagcattgtcacatctttcaggtttgtagagtctctcatgtatgaattagcctatgtttcttaagaattgaggatctgttagaggctttcccacattcttcacacatgcatggtttctctccagtatgagttgtcttatatgtagtaagccttaaggactggttaaaggctttgccacattccacacaattataggaattccctccagtatgaattacatgaatgtttagtaaggattgaggaacagctaaaaggcttgccacattcttcacatttgtagggtttccctcctgtataaattcccttatgttcagtaagggttgagaactaatgaaaagctttgccacgtttttcacatttgtagggcttttcctccagtatgaattcttttatgagtagtaaggtgtgaggaacagttgaagtctttatcacattcttcgcatttgtagggtttctctccagtatgaattctcttatgttccacaaggtttgaggaccggttgaagcctttgtcacattcttcacgtttgtagtgtttctctccagcatgaattttcttatgtgtaataaagattgaggactgtttaaaagctttgccacattcttcacctttgtagattttctctccagtatgaattttcttatgtttactagactgagaatcagctgaaggatttaccacattcttcacatttttagggattctctccagtatgaattttcttatgataactaacagttgaggatgacttaaaagctttgccacattcttcacatttgtagggtttctctccagtatgaattctcttgtgtctagtaaggcttgaggatctgctgaaggctttgccacattcttcacatttgtagggtttctctccagtatgaattatcttatgttcagtaaggatcgaggaccagctgaaggctttgccacattcttcacatttgtagcgtttctctccagtatgaattatcttatgtttagtaaggattgagaacgtactaaagcctttgccacattcttcacatttgtaaggtttctctgcagcatgaattctcttgtgtttagtaaagcttgaggaccaggtgaaggctttgccacattcttcacatttgtagggtttctctccagcatgaattctcttgtgttcagtaaggcttgaggaccagctgaaggctttgccacattcttcacacttgtagggtttctctccagtatgaattctcttatgttccatgagctttgaggatgagttggaagctttgccacattcttcacatttgtagggcttctcttcagcatgaattgccttatgtgtattaagggttgagaccttactaaaggctttgccacatccttcacatttgtagggtttctctccagtatgaataatcttatgtttagtaaggattgaggatcgattaaaagctttcccgcattcttcacatttgtagggtttctctccagcatgaattctcttgtgttcagtaaggcttgaggaccagctgaaggctttgccacattcttcacacttgtagggtttctctccagtatgaattctcttatgttccatgagctttgaggacgagttggaagctttgccacattcttcacatttgtagggcttctcttcagcatgaattgccttatgtgtattaagggttgagacgctactaaatcctttgccacattcttcacatttgtagggtttctctccagtatgaattatcttatgtttagtaaggattgaggatcgattaaaagctttgccacattcttcacatttgtagggtttctctccagtatgaattaccttatgtttagtaaggattgagaacttactaaaggctttgccacattcttcacatttgtagggtttctctccagtatgaatactcttataataagtaagggttgaggaccagttaaaagctttgccattttcttcacatttgtaggaattctctctagtataaattctttcatgttgagataggtgtgaaagcatgcaaaatgatctgacatattctttacatttcaaacctttctctccagtatgccttatcttatgtctgtttgaatttgaacatttatgaaagacgtttgcatatttgccacattgaaatactttgctctgtgtagttgttaaactctggttaagtttattataaccttctttgtgcacgttacactcatccacattggtacaactaatttttaagtgtaaattctcatgtccacatttgtcatatcttctcaatatcattttttggaaagaatcttctatgccttgctctggccaaaactcttgggaaaaatgagaacatataactgaaaagaaataaaaataacaaattaatctacatattagactcagataagtacagtttccaaatctaacctataaaattattcaaactacataagcaagacgacattgcaatatgacacaggccctaattcttcatagatatataaatgtaataaaaacatatagaccaaaatacatatgtgaataatttatacatgagttaagtgtgtgcatttcctcaattaagcccaatgcaaagagccacatagaaaacaagaaaagtttgttaaatttacccaatacaactctttctgctcctcaatattacctagtcccttcagaagcaaattgtccatttctgatttttttttttttttaaggaaagtaaaatattgacacatccaatttaatttttgtcttctatggctctttccacacactggtttctgtctctcatgacataaagtgctgaaatacatggtggtatactttgaaatgaaagtttgagcctgctgagatcaaaggtaaatgcactgcagcagagcactgcagtgccacagagagagtacaggtgtaccaagtgattacttttcagaagaaacataaatagtctcttttaactaaaaataaacacaaaatttcagacaagacaaacctgaagatgtttgagagacccacataatctctagccaagaccattattttctgactatgccaggacaaagctacattataaattttgtgacaggtggcctttttaaatgtccaaatctcaaagattacagtctatacaaaatagggcaatataatcttatcaaaaatattataaagttttcagaaagaaaccattgaaaatgtatatactaattttaaaaattgaatagcactcaatgagtgaagcaggaacacaaaagactatagaaaatgagaaaaatgaggataagaacaaaaataaccagtgaattgtcaacaaaagatttgcaggatagaagagaacagtgtgatatagtcaaagttctaaaaaaaaaaaaaaaaagcaaacaaaaaaaagaagctataaagtgagaataaataccatcagcaaatctgtcctgcctaaaagaaaaaaaaaaaaagagctttcaaaataaccaaattcttaaaaagtatattttgcactgcatacgtcttccataggaaagatgctgaaagtagttcttaccactgaaaataacataatgtaagaaaacaacacctagtcatataaaaatacattattttctaggaaagatatgcacacacaaaaaaattgaatttctagcattattctaatggtgcagaaaacatttttaattattctctaacatttgagagataaaagcacaggaattattataaacatctgttaatgaatatacaacataaatagataaacttagcaacatcagtgaaaaatttaagagcagacataataaggaggacttttttatgcaactgaagttaatttttcacctgattaaaatatattgttttatttttagaggttttatgtaatccccaagataccacacaaaaaaatctgtatacatacacaaaagaaaaataagaaaatgaaagcatatcaatacgaaaaccagaaagaaacaaaggaagacagaaagagaaaatgagggacaagatgaaagaattaaatagaataggtaataaaataaaagtaactcctttactttcagaaaattatttaaatatacggaaaattaactttcaaatcaacagaattttaatagatttattaacattttttcttttgagacaaagttttactcttgttgcccaggctggagtgcaatgacactatctcagctcaccgtaacctctgccacccaggttcaagcagttctcctgcctcacactcccgagtagctgggattacaaaagtctaccaacactaccagttaatttatgtatttttagtagagatgaggtttcacaatgttggccaggctggtctggaacccctcacaccttgggtgatccacctgccttggccacctaaagtgctaggattataggcacgagccgccatgcccaggttatttaaaaaattttaaatatcaagatccaacttgcctttctacaagagtcagttgaaatctaatgttaaaaagactcaaagtggcaagatggaagtagacatttcatgcaaatattagtcaagtgagagcagaagaggtcaaaataatattacacaagctaaatcttaagtcaaagactcatattttataaaatgcacttgacaatgaaactccaaagagacaaagaaagatattaaaaaataatagattaactgggaatctgtgaaaaatctgaatgtgtgtatgtgtgtgtctcacattaggattacaaatatataaagcaaatattgatagaatagaagaaacacaaggagatcaatataattatagtaggatattattataccacactttcggtaataaaaatgaaaatagaggaggctggcaagatggccaaataggaacagctctgatctgcagctcccagcaagactgacacagaaggtgggtggtttctgcatttccaactgaggtacccggtttatctcaacgggactggttgaacagtggatgcagctcatggagggtgagccgaagtggggtgcagtgttgcctcacccaggaagtgcaaggggttggggaactccctctcctagccaaaggaagggtttagggactgtaccataaagaacagtgctctccagcccagatactgtgcttttccatggtcttcacaacccacagaccagaagattccctctggtgcctatgacaccagggccctgggtttcaagcacaaaactgggaggccgtttgggcagacaccaaactagctgcaagagttttttcttttttttccccataccccagtatagtgcccagaaggccagtgagacagaaccattcactcccctggaaagaaggctgaagccagggagtcaagtggcctggctcagtgggtcccacaccatggagcccagcaaactaggacccactggcttgaaattctggctgcaagcacagcagtctaagcttgacctgggaagctcgagcttggtgggggaagggcgtctgccattgctgaggcttgagtaggcagctttaccctataaagccacccagaagattgaactgggtggagcccaccgcagctagcaagaccagactgtatctccaggttcctcctctttgggcagggcatctttgaaaaaaaaaaaaaaaaaaaaaaaaaaggcagcagccacagtcgggggcatatagtaaaaacacccatctccctgggacagagcacctgggggaagggacagctgggagcacagcttcagcagacttaaacatccctgctggacaactctgaagagagcagtgcatctaccagcacagcgttcaagcgctgctaagggtcatactgccacctcaagttggtccctgacatccgtgtctcctgattaagagacacctcccagtagaagctgatagagacctcatacaagagagctctggctggcatctggcaggtggcctctgggacaaaccttccagaggaaggaacaggcagcaatctttgttattctgcagcctctgctggtgatacccaggaaaaagggtctggagtggacctccagcaaggtctagcagatctgcagcagggaggcctgactgttaaaaggaaaactaacaaacagaaaggaatagaagcaacatctacaaaaaggatgtttactcagagacaccatccgaaggtcatcaacatcaaagaccaaaagtcaataaatccataaagatggggagaaaccagtgcaaaaaggctgaaaattccaaaaaccagaatgcctattctcctccaaaggatcacaactcatcaccagcaaaaaaaaaaaaacaaaactgaatggagaatgagtttgacgaattgacaaattcaaatttgcaaatttcagaggtgggtaataacaaactcctccaagctaaaggagcgtgttctaacccaatgccaggaagctaagaaccttgaaaaaaggttagaaggattgctaatgagaataatcagtttagagaagaacataaatgacctgatggagatgaaaaacacagcacgagaactttgtgaagcatgcataagtatcaatagctgaatcgataatgcagaagaaaggatatcagagattgaagatcagcttaatgaaataaagcaagaatacaagattagagaaaaaagaataaagagaaacaaacaaagcctccaagaaatatgggactatgaaaggaccaaatcttcgtttgattggggtacctgaaagtgatggggagaatggaaccaagtaggaaaacactcttcaggatatcatccaggagaatgtccccaacatagcacgacaggccaacattcaaattcagaaaatacagagaacaccacaaagatgctcctcaagaatagcaaccccaagagagagaatcgtcagattcaccaaggttgaaatgaagaaaaaaatgttgagggcagccacacagaaatgtagggttacccacaaagcaaagcccatcagactaacagtggatctctctgcagaaaccctacaagccagaagactggggggccaatattcaacattcttaaagataggaattttcaacccagaatttcatatccagccaaactaagcttcataagcgaaggtgaaataaaatcctttacagacaagcaaatgctgagagattttgtcaccaccaggcctgccttacaagagctcctaaaggaagcactgaacatcaaaaggaacaactggtaaaccagccactgcaaaaacataccaaattgtaaagaccatcgacactatgaagaaactgcatcaactaatgggcaaaataaccagctagcatcataatgacaggatcaaattcacacataacaatattaaccttaaatgtaaacaggctaaatgccccaattaaaagacacagactggcaaattgaataaagattcaagatccaacaaagtgctgtattcaggagatccatctcacatgcaaagacacatataggctcaaaataaattgatggaggaatatttaccaagcaaatggaaagcaaaagaaagcaggggctgcaattctattctctgataaaacagatgttcagccaacaaagatcaaaagagacaaagatgggcattacataatggtaaaaggatcaatgcaacaagaagagctaactatcgtaaatatatatgcgcccaacacaggagcacccagaatcataaagcaagttcttaaagacctacaaagaaacttagattcccatactgtaatagtgggagactttaacaccccactgtcaatattagacagataaatgagacaaaaaactaacaaggatgttcaggacttgaactcaagcagacctaatagacatctacagggctctaccccaaatcaacagaatatacattcttctcagcatcacatcacacttattctaaaattaaccacataattggaagtaaaacagtcctcagcaaaagtaaaaaaacagaaataataacaaacagtctctcagaccacagtgcaatcaaattagaactcaggattgagaaactcacgcaaaaccgtacaattacatggaaaattaacaacctgctcctgaatgactacagggtaaataattaaatgaaggcagaaataaaaaagttctttgaaaccaatgagaacaaagacaaaacataccagaatctctgggacacagacaaagcagcagtgtctacaaaatttgtagcactaaatgcccacaagagaaagcaggaaagatctaaaattgacaacttaaaatcacaattaaaagaactagagaagaacaatcaaattcaaaccctagcagaatacaagaaataactaagaacagagcagaactgaaggagatagacacaaaaaacccttcaaaaaaatcagtgaatccaggagctattttttttttcaaaaagatcaacaaaatagatagactgctagccagtctaaaaaggaagaaaggagagaagaatcaaatagatgcaatcaaaaataataaaggggacaccgccactgattccacagaaatacaaactaccatgagagaatactataaacgtctctatgcaaataaactagaaaatctagaagaaatgaataaatcccaggacacatacaccctcccaagtctaaatcaggaagaagtcaaatccctgcatagaccaataacaagttctgaaattgaggcggtacttatgggcctaccaaccaaaaatgtccagaatctgatggattcacagcctttgtaccagaggtacaaagaagagccgattctttctgaaactattcccaacaatagaaaaagagggactcttccataactcattttatgaggccagcatcatcctgataccaaagcctggcagagacacaacaaaaaaagaaaatttcaggccaatatccctgatgaacactgatgcaaaactcctcaataaaatactggtaaaccgaatccagcagcacatcaaaaagcttatccaccaagatcaagttggcttcatccctggaatgcaaggtttgttcaacatacacaaatcaataaatgtaatctatcacataaacagaaccaaagacaaaaaccacatgattatctcaatagatgcaggaaaggcttttgacaaaattcaacacctttcgtgctaaaaactctcactaaactaggtagagatggaacatatctcaaaataataagatgtatttatgacaaacccacagacaatatcatactgaatgggcaaaactgtaagcattccctttgaaaactggcacaagacaaggatgccctctctcaccactcctattcaacatagtattggaagttctggtgagggcaatcaggcaagaaaaagaaataaatgatattcaaataggaaaagaggaagtcaaatagtctctatttgcagatgacatgtttgtatatttagaaaaccccattgtctcagcccaaaatctacctaagctgataagcaacttcagcaaagtctcaggatagaaaatcaatgtgaaaaaatcacaagcattcttatacaccaataatagagagccaaatcatgagtgaactcccatttacaattgctacaaagagaataaaatacctaggaatacaacttacaagggatgtgaaggaactcttcaaggagaactacaaaccacagctcaagaaaataagagaggacacaaacaaatggaagaacattccacgctcatgcataggaacaatcaatatcgtgaaaatggccatactgcccaaagtaatttacagattcaatgccattcccatcaagctaccatttactttcttcacagaattagaaaaaactactttaaatttcatatggaaccaaaaaaaaaatctcacatggccaaggcaatcctaagcaaaaagaacaaagctggaggcatcatgatacctgacttcaaattatactacaaggctacagtaaccaaaacagtatggtactggtatccaaacagatatatagacaactgaaacagaacagagccctcagaaataacctcacacatctacaaccatctgatctttgacaaacctgacaaaaacaagaaatggggaaaggattccctatttaataaatgatgttgaaaaaacttgctagccatatgcagaaaaatgaaactggaccccttccttacaccttatacaaaaattaactcaaattgatttaaagatgtaaaagatttaaagatgatgtaataccccaaaccataaaaatcctagaagaaaacctagagaatactactcaggacacaagcatgggcaaatacttcatgactaaaagagcaaaagcaatggcaatgaaagccaaaattgacaaaagggacctaatttaactaaagagcttctacacagcaaaagaaactatcatcagagtgaacaggcaacctacagaatgggagaaaaattttgcaatctatccatctgacaaagggctaatatccaggatctacaaagaacttaaacaaatttacaagaaaaaaaacaaacaaccccatcaaaaattgggcaaaggatatgaacagacacttctcaaaagaagacatttatgcagcgaacagacacatgaaaaaaagcacatcattactggtcattagagaaatgtaagtcaaaaccaaaatgagataccatctcacaccagttagaatggagatcattaagaagccaggaaacaacagatgctgcaaagatgtggagaagtagaaaagcttttacactgctgagtggagtgtaaattagttcagccattgtggaagacaatgtggcgattcctcaaggatctagaactagaaataccatttgacccagtaatcccattactgggtatataatcaaaagtttataaatcattctactataaagacacatgcacatgtatgtttactgcagcactattcacaatagcaaagatttggaaccaagccaaatgcccatcagtaatatactggataaagaaaatgtggtacatatacaccatggaatactatgcagccataaaaaaaatgaattcacatcctttgcagggacacggatgaagctggaaaccatcattctcagcaaactaacacaagaacagaaaacaaaacacagcatcttctcaaatatacaggaatttaacaaaacactcgagcacgctcttatgcaaaggttgtaataatactgtaaagatgttcatcctgctcaatgtaatctacacagttaatgaaatgttcctcaaatttctcactgcatttttgaaaaaatagaaacagcaaccctaaaagtatatagaatctcaaaagacaatacccaacaatcttaaaataataataataataaagcaatgttgcaggcattaaagttcctgatttcaaaagacattccaagctacagaattaaaacaatctggttaagtataaggatgaaaaattagactaataaaatagaatgcaacatatatatatatatatatatatatatatatatatacatacacactttaagatatatggtcatatgaggagtcatttacatagcaataattattactgtaaactaataaaggcaatgcaaatttgttaccaaatcattcagtaaatataatttgaaatataaaaatactggaatatcactcagttttcaaaagcagaaattataaagcaattataaagataaatcttgataacattatgcaaaatgaaatgagtcagccataaaaagacaaagattctatgagatagatagatataaagcaattacactcttagaaacagataaaaagaaaaaggtcccctatttgcttaacccccaacagcaagaaagtctgtcagtcatccacgacaaaaatgtcttaatgagagaatcagacatcatggttaacatctgtaatgacagctacatggtatagaaaggttggagaattgctgcaggccaaaactttaagaccaacctgggttatgtagtgagaccttatctcaaaaataagtgcctttaagagagctttgagatccagtgagggaattgtgaaactttgctaaagcccaagattgaggagcacccttttcagaaggcaagctttcattcaggtggcaaactagaggacccctgctcttgactacagaccagaaaatgtcccaccctacttggtcccacagagaattttgaacttactctgtaaccatcccaaactcctcccagccacagtctgtgagaggtcttggtcctccagaggcttggagactgatacccatttagagccatgctggcaggcctgcagaccttggtccttactgtcgtcccaatagcagttccatgactcagttccagcttcctaagccacagttcatggccagttctgcctacatagaatcccacagtgacctcagaaatcctctctggtactcaatgaaaagccatactaatccacatcctaatataaagcccaccatatgcagacttgactgtagaaacctgccctagcgtctaccctactgagcaacgtcctgaaggatatttactctgtccaaaaataaaatgggaattacaactgcccaagccccttgtaataagccaaccctagtgcagagccagcagccttgtgaccaagctacaaccccactctactacaaacccagagggcattctatcaccctgggggccccaaaaaagaagatttttaccctctgaaaccagtttataaaaattttaagaggtgtttactccttcaaattcagacaccaatgcaaaagcatactgtgccactgacaatgcttctatcttaacacagcacttgaagtatgtggaagaaaaattagtcaaaaaaatttttaagtcactgaaattgaaggcaaataagtaaaacattgctgtttgtagatcatgcaatgttctctataaaaaaccataaacagtacattaaaatcttttcaaactaataaatacactcagcaaattagcaaaatataaaattaacatacaagtataagttatgattccatacacttaaactatctgataaaatagaaaaagaaaaccatcttatttacaatagcactaaaataataaatatctgagaacaaatttaattgaggagctgaaaaacttttcaaggatttatcaatgaaaaatgagagaacacaaataaatttaaatatattttatgtctatagattcaaataaatgttaaaatatcatattacccaaagtgatctctagattcagtaaactctgtcaatattccagtgtttttctttcacagtaatgaaaaatacaatcataaaatttacatgaagctacaagaaactgtgaatagccaaagcaatcttgaggaaaaataaaaaagcagaaggatattatactttataatttcaaactatatttcaagactatagtaataaaaacagaatgaaatgtgcagaaaaatgaaccaaaaaaaccccaatgatacagaaaccactactctcacacacttcagagatgatggaaaaagagaacttaaaagatagtttaacatggagtaccttaaaattacgcggatatctatgtgtccacaaaaacaaaaaaaagtcagattgcactctcttgtatgccatgaacagtactttggctatcactgtaaacttgaaggaaaattacttaagggaaagaagaattcttagaaattttaaaagcataagttagaagatgcccctgtgtgagagaaaattaaaaaataaaaataaaaattagctttccagaaacaactacttttggaacacagcttcccaaatgactttaaggactggcttcctcattgactttggacttctcattcatgttgtctgtattcactctcacctacctgggggttcttccaccatctcatgtctcttcatattccagggctcttttccttgctccagaaaaatgatcaggtctggcttaaaggcagcaatacctgttttattaaaaatgaacaacatccatcttgctcatattctccaattaccaacttagtaatgtgctcagtaaagaggatgtaatagaatattctaatacatttatcccaaaatactaaattataacatgtctgttgaagaaaaacgttatgtgcagttgcttaaagttctgttgaaacagtctggagctcaagttaattcacaaacattaagcttcttcagaaggttattgcgcataacccatggtttctgcaggcaggtactctcactgtggaaaactggaacagagtaggagatggattgaaatgggttcgtcaaaaaggtcttaaaggagacccttctgtgttttctgcttggggtttggtttgcacggtcctactgccgctgtctccttcttattttgtcagacaacaggagtcaggttttgagtctcaagaattaaaaagataatttcttcctccaacagcgcctattgaaaataatgagcaggagaaagggaagaattgtccatttgctaagcaggaaaaaggagaggagaattggcctctgctaccccctccaataacagaagtagaaactcccatacaaaaaattttgcatgctgatgctgcggctagggaacctttaggaccttgtgcttttcctattactgtgaggcctgatccaaacaatctgcaacatcttttacatgagcacactcctgtacagtttaaattactgaaagaattaaaagctagtgtggttaataatggagtgcaaagcccattcactatagggctgttagaattggtgttcagagccatgcacctcccactctttgatataaaacatttgggttgcacttgcttatccgccagtgcatacctgatatggagcttaaactggcaagaaatgtgtgcagatcaggctaggtagaatcacactgctggtcaaggaaacattagagagaaaatgatgacaggcaatggcccattttcagatctggtacaataattaacattcccagatgctgcttaccactggtctgccttagccgccaagcatgcttggagcacaattcctgaagagggagttccagtgcagtctttctacatgtcatgcagggatcatgagagccttatgcacaatatatcacatggctgcaagaggcagtgtggcatcagatccctaatgcccctgctgcagaaatgcttaccataattctaacctatgaaaatgtaaatgcagattgcaagtgtgcaatggctcctgtgagatccacacaaagcttggggaattaccttaaagcttgtcagaatgcaggaactgaatttcattgttctacaatgttagcacaagcaatggctagtttagtagttgacagatctaaaaggagccaaggttcaaaccctaaagtgggaaaatgttacaactgtggaaaaactggacatttcaaaaaggaatgccaccagatctcaggacagaaaggaccttacaatgcggtgctccccaccccgagcagaaaaaacaccaggattctgtcctcgctgtaacaaagggaatcactgggctgtaacaatggacatcattgggcgaatcagtgccgctcaaaatttcatcataataacacccccgctaggaaacaagaaggggccctggacccagtcccctcaaacaatgacggcattcccagttcaggccacaaccccacttcaagggttggtcccaggagaaacattgattccctctccccaggaacaccaggaagtgcacgattagatctcccagtcagagaaagaattacattagttataggagacaaacctaccaaagtacccactgtcatttggggacctataccagcaggatacatgggactaattttaggcaaaagctgccttaacttgcaaggcatcactgtaatcccaggagtagttgactccaattataaaggagaaatccaagtagttttaatgtcacaagatctttgggtttttgaaccaggggaatatatagtgcaattattgcttatgccctgcaaattacacccttttccacaaaaggagaaatgaggaaataaagggtttgggagcacaactacatgagaaatctatccatcacaactcatagcctctaacagactcacctgtgtagtacaaactaaaggaaagaaattttatgggcttatggaaacaggagccgatgtgtcagtaatacccagtaaggattagcccccgtcttggcacattttgggtcgcatccctgggctatggatttctaataatctgtccaagccttgggctgccacccctgctttgcactttgtgaaacttcttctaactcaacttacttatcgtgtccgcagacccttaggcatgataatttttgctattgtttccttggtcacactaataacttctattgtgatgtcctctgtagctttgcatagttctattcaacagctcagtatgtggagaactggatgcagaggcatacagccaaccaagcatggctactaaagaataaaattaacactgagttataaacaagtggcaatgttgaaatccatggttctatggttaggagaacaattacaaaacttacaattgaaagagcaattgtgctatcatttaaatcacactcatatatgtgtaaccaacgtagaatataaccaaagcgagtatccatgggaccttgtgaaagcccatttgcggggagctttcacacccaacatcacctttgatactggtgaattacaaaacaaaattcttgatttaaataagcaaactcaagagtttcagccttctttagaagactggaccgaattccagcaaggcctggagagcctcaatccttggacctatctaaagcaccacacaaacatctcatatgtagtttttggagtaatgctgttctgtctctgttttctgttcatagtctgtaaaatccgacggaccaatcacaaaatgagagctgcccaacctggccttacgtttatttgattaatgcataaacaggaagggggaaatgttgggagctgaatgcctgagtgttgtgaccaactcagcattccactggaggctatatgatcaaacagcaaactgtttatcatgagtgcagaatgtgggcaaacttgcttctgctcctgccaccagaaggtatactgaggacagtcactccctggtgccatgctccttggagttatctactggaacatctggagagtactgttcaaagaatacagtcatgcaggcctgcattaagtcaagcagctgaccacaacctcccccttctccctatctcctttactcaataaatacaaagggctatagaagctcaggacccttgttcaccagaagcaaggagtccacgaccccttcttccaaatatactcttttgtctttgtctgtattctcgcattcatcctcctttgttcagtccaataaggtctgcagcaaaatgaaacctgtagtatatactaggaattgcgtattaaagttattctcacccaggaagaccaggtttctgtagttctctaacatcacattcctatataaattctgctgtgtagaatccaggcattgccactcctccagagagaattctatggccacatccctaaatgtcaatgctccctggaaaacacacacaaacacatatatttaccaattggtcatgggcagaacttttaatgtgactcaaggtaaaatggagagagtagagagagctggttctgacttatatgaatgactgaaattattcaataaaatagttttcaacacagaaatgttcactaatgtattctctaactctgagaaaagaaagtggtataagatccataacatctgtgtatatgtaatatttttctagataataaagtataaaattgagggcaaaaacactaacatgtacaattttgagtgctatatttacatcatacagaattgtgtgccaggcatggtggctcatgcctgtaatcccagcactttgggaggctgaggtgggcagatcacctgaggttgggagttcgagaccagcctgaccaacatggtgaaaccccgtctctactaaaaacacaaaattagccatgcatggtggcacatggctgtaatcctagctactcgggaggctgaggcaggagaattgcttgaacccaggaggcggaggctgcagtgagccaagattcattgcactctagcttgggcaacaagagtgaaactccatctcaaaaaaaaaaaaaaaaattcatcgtgtgtatttttcagatggaaaagacatagttttgcatattattcagatggaatagacatgttgagttagaaggtatgactcaaattttaatgtgtgcaataagctagagatcctgttaatgcaattttttttttttcagatctgggataaagtctgagttgctgaatttctaataagctcatcagtatgccaatgtttttggcccaaaaagactattttttaaaacatccagtaatagaatgagcctgtgtttttctgtttttctggtttgtaaacaaagataagagccttcattttccaaaaacagacaaatgcaaaggaaacctaagaaagaagggcagctgtcagattaaatgttttggtttattcacatcagctgcataaagatatttaatgatgaagaggaaaatgattaattccatagtaaaaaaatgtgtcagagagcttatcaaccaagtgatttattaacatcaattacactagaacacatttttttaatgtcctgatgtacccagaaggacacagtattactgctgagatattgccccccctctgaaaggtaaattatagtctgaatttaaccataaggaaacattagttttatggaaagttcaagatagagatatctcccatgttctgtaacttttagtagtgattttaaatagtatttcttcagcactgagagagcaggtatctcctaacaattttttttagaattttctgggtaataaataccacactgcttcaatgagtgttttcttaatcttgtactgcatagacataataaagaacacagatgaaaccacaacattacatgttctctgtcttcactaaaaaccccaggttttccccaatatgaattttgagtatctacactttcccatgttcaacagccacaaagggacatttttaatattgcagattataaattcatagtgagatttctgcatggcatataagaagccataatatagagaaagctctggtatatagaaaaaaatatatttttcagagactttgattattgtaagaattttttaaagcagttaagacaaactcattagggaggaaaaacacaggtacacagaagtacaggtttgcaagtactaaacgtatgtttcctggaggaagaatagtggacacagatcttgatctcagacatgtttaggtgaaaaagaaaaggccatttttttctctttctcctccttccctaggattctttctcagataaaattttctagacaaattacacctgcatcttgagaatatgcctttaaaagtgtcagcaccacaggtctacctgctgtcaccacatccacaggcagaagaaccaagacagaaaaactccatccatttctgtcctttatagcagaagagatgaagaaacaatgagtagctccacagagataaaaatatgcttttctttattttgtcctcaggagccatcccctgacacaggcaccagcaatttctgccacagtaatgtaaatatgggccacggtgtactgtccctaccaaatccaaacagaacaggttcttggaccaccctttaatgcaaagatggaacttaactctcatgaatgtattatgaattcctcatacttgattctggcctcaccttagagtcacatgagccacttaattaaaacaacatgaatgcttccaccaagaacaataaacagaatccatggaaagggcacaagtaaagagagttctgcaaaatggccaggtgatactaattagaagcctgggctgataaccccttaactaagcatttcctctcaagctctaaggagcttataaatgacttggtaattttggccccactctatgaaatgtaattctgcaggtatggaaagggtccataaatgggtcacttaaacaagtgcgctgtcaataatgatgttgctcccactgggcttattattagcattaattagagaaatgaggcagaacacagatacttctggtacaaatgaaaacaatcattcttcatcctaaagtattatattatttgctgactctttaaaatttacagagaaaacagaaagcagcaatttctgagtaagtcagcatttggaaaacaacgtgtgcacatgtactaatgcaatgtttattaagcaggtactatgtgctcaataggatgttagagtactgtgatagcacattatgtgatttaatcctaataacaccctttcagttgatactaagtgttcaataattccaaggctttaaaggacccagcatttttatttctatttgtttatctgtcattgatttttcaaaaaatgcatagaataaaagctaactatagacagatgaaagggatacagatggaaagagcttaataaaatttagataaatttttattgtgtttatatttactttcttgtgacttgtgaatcaactgcaaagaatagaaaacagaacagaaaacagaaatcagctgcaggaacagaaaacaagttgctaaataatgtctctgcaagcactggttttaattaaaaatttgtaaagtaagattctataatacatactttatatttcccatttatctgcttttaagtctcagaaaatgttgaacaccagctctaaaaaggcaacagtattcatgacccaaaactctgatctcttctaatcagttctttgaggcaagactccagggtagggccagacataaataaggcctccaaaaagggtgaatatgaacagggctggggcagagtgtagagccaatgtacaattctgttctctatggcactggggggtattgtaagttctttttttttaaatcttacttaagtaaacttaaatctgagtttgtataattttaatcttttttagccactgccctgtaaattttatattacatactaataagaaatttaaaaaaaaatcccttaaggttttctataataatttttttagaagaaaaataagtattcttagcagggtaaaagaactacaaataataataacaactcttccaattataagttcaggtgtagacatcagaaaccacaatataaagaaagtggctcaaataaagcccaagttgttttttgcacatctatttattgtacccaccatatgatgcataattcaaccatttttccagttgttagtttagactaaaacttccaggatggtaggaatcatgactgcttcatcaatttttttttttttttttttttgagactgagtctcactttgttgcggaggctggagtgcaatggtgtgatctcggctcactgtagtctccacctaacaggttaaagagattctcctgcctcagcctcccaagtagccaggactacaggcatgagccaccacacctggctaaaatatgttggtttattcaacacattattcaatattattcaatatggtgaaatccctatttcaccatgttggccaagctggtctcgaactcctgacctcaggtgatccaccatcttggcttcccaaagtactgggattacaggtatgagacactgcacccagcctgcttcttctatttttttttatgactatatgaaattgaagcaattagtttatctctttgagcctccagacctcctgattttttactcaagtaccagggatctgttctggacattctcaaatgtctcagagattcgtaggtgattgtgagagggttcccagtgaacctgggctgatggtccaatgataagacagacagagaagactcaggatgattctaaataaaaaatggaactactttggctgaactccagaatctgggttgcctgtcctgatttgctagctgttgggtaagtagaaggacaagaatactctactccagtatcacattttacaagtaggtatagttgtggtgtggctctggatactttgtggccttaagatgattgtttacacttacagattctgccatcagattctatttactcctggagcctctcacataactggggcaggttaatgaagatgtgaaaggtcaaaaggccacactctcaaaaaaggaaattaaaatgtctatgttgatatctcacaatgcagaaaatgcctcctgttggttttctgtaaattctcaatccaaagtctggctttgccttgtaaattccaggcagaggccaggtcttatttacaaattctaggtgaaatcaacctcactctgcatttttgggtgttacagcaagtaaagtgaaatgaaaggagagatcccctcttagaggctgctctagaacattctaaataatattttacctgaaaaaagctgacacaacatgaacataagcagacagtttatttgggtcaagcttaaggattttaacttgagacaaaatattcaagttgcctggaatctacactttcattagcagcacttacaagtggatttgtaaaggcaaaaaaaaaaaaaaaaaaaaaaaaaaagaggtacagtgaatgagctgatacgaaattggttgtgagaaattttacttatgtaaagaaataactttaataattgattgcatatacatcaaggttaagggtatggaatttagtgtccagagtggaattattggtctaatttaaagctacttgtggcaatagtgaacagtttcaagagataaatacatagctgaagaaaagggagaaaaacataactgtgctcattttaatggctctctgactttgataactaaaaggacttgcattcctcagataaaaacttttttttttcttttcaattctcaagacctagatttagaatttggagctgcaaattcaggtcctgcatgggtaaagtagcagcaggtggtatctgaatatttgtgggcattatagcatgaggagggagggagaactggattctcacgtctacaggtctactcaatgcacatattttactctgattgggtttctgtgccccatggtcactgaatcagtttcaggtctgaagacacaagtcattgaaagaggtaaaacggttaatatctgacctataaagtttgtagaaatctgttctagcctctctaaaagtgactgcagaggatgatagataccaagtaggcagagacacaattccacctgcatatttagggtacagcatgcacttcgcagcacaattgtgaatggactggaagcctgagtggaaaaggcccatctatagtaaagcttagttggtaccctatgtgtttatattatgtctggtaattctagacaaggtttggaaaatacagttagaagcaaaattttcttcagccccagaggaattaaataataacagaacagaaagaaaactgttttattacacaattacatgtgaatgtgacatgcattacagtcaatttgctcaagagattgcaaagacagaaagacagtcaccataattcatctacaagtagaatttacagcaccatgtcatacatagttcatcctgaattcatctggtagctgggaaggccatccctgtatgctaactggttataatcaatgacaaagtaaagctttcacatcttcatgactagaggtagttttgcaacttgaaccccagggcctgctgaaggtaggctttgactcttctacaaaaagtgttgattcgggtgctatctttttggctatttacattttaaagcaatagctctctactctctgagcactgggctagaacactcctgctttccctctcttggtggctagtgtactctcttgaccccaccatctgccactgaggcacagcccacagcacagggctcacagctggaaactcacatcttaggtgaaccccatttgccacagcagcactccagtgccacatcagacagtgaagcctgagcagcaggaggagagcctgcaggcctcctgggtagaattgcaccttcacaataatagaaaagggagcactgtttcagcctcagtttttatttataatggcggcatgaaaaaaatactgctggattttagcatgagtccagatagagatagctctgagagttctcactgtgacagcccacgtctttcacagacaccacggaatactaatagggcttctgaaacagatacacaatgcattagagagaaaaacagctcttattctgagaaagattatattgagagaaaaaagttaaaagtgtcttaagaaaaaactgagattagatataagattgatcaagtcagccagaaaatatttccctaagaagaatttctctccaaacacccaaagtgcatagctactctcagcaagagaaacatgagcattattgaataaagggggtatattctcagcacaattttttttttttgagatggagtttcattcttgttgcccaggctggagtgcaatggcatgatcttggctcactgcaacctctgcctcctgggctcaagcgattctcctgtctcagcctcccaaatagctgggactatagacacacaccaccacacctggctaattctgtatttttggtagaaacgaggtttcaccatgttgtccaggctggtctcaaactcctgacctcaggtgatccacccaccttggcctcccaaagtgttgagattacaggcatgagccacagcgcctagctctcagcagaattttaaaagatttatcttccatctctgctgctctcttatttcctaaccattgaatgtgagatctacactggaatatatctgacaacttccaccagcacttttttataaaaaattgaaatctgactgtgttaatatagtagaatatattagagcttgcaacatacctaactggagagctattacagtttttgagtagccatatcacctgtctttatttatcctgtaatagcagcatactaatttggtaaaatatatgacactaaaattatgcctacctataatttttcctattgggtaaattaataagcatgtcagactaacatctactgtaacaatttaatggtaaaatttttgggatagcagatatgaatatataagtatgaataattttatgtactagtcataatgtatgtaagattttttaaaattatctgaactataattcagttgaaacactatatttcaaaagtatgaataacaatattaaaataaggaattcaatcaaagtaaatattgtggccttaaatttatactattctagaaaatactgtttaatttacatgaatgcaggttgtctacaaacactacacataactatactaactgtactgaagcaacccaagtacaacagactccactgttcagtttatacactgaactcttctggctttcgcagtgtaagtatttcagcctgcaaataatcaccttggataatcgggtttctgccaaagaacttactcaggatcttttagtctttattattctgtattgctaaattaatccgatctttgtgcttaactttattaggctcttgaaataaattttactctcaacaaatctgtgtctactttaaagactaaagataaaaatatatataatcttttgccaagaaaaaaggaaagcaatgaatctcaggtcccagataaagacaattctgagtcaaaagaatgacaaaaggtttgtttcatttctaatatgatttacatatatttcaaaaagcagaagaaatatatacatataatctaaacctttttttaaaaatcagcaagttatccacccttattttcacatatgagaataaagcctcttatttctcatttatattttctcttacaaaagccaggtctctggacaagttcttgaactcttggacatctgaattttgcacactgtgtgcacttaaaagaatgtttatggggggaaaagcagaagagagaaaattgttataaaaaaaaaccatgggttcacatgaataaagcaaattattagagacctatgaagagacttagaatctgacagtaataatcggggactacatctcacaggcactaatggagagatcattgaagaaaatcaacaacaatattaggacctgaactcaacacctgaccaaataaatagtcctaatagacatctacagaactcttcatctaaaaaataccataacatacattcttctcatcaccacatggcacatactctaaaattgaccacacaatcagaaaaaaaacaattctcagcaaattcaaaaatcccaaaacgatacaaggcacacacacagtttacagcttaagagaaacacaattcaataccaataaaacaactggaaactatacaattaaataaaaattaaatggcctacacttgaataacttttttggtaaataatgaaattaaggcagaaaccaagaagtgttttgaaacaaataagaacaaaaatacaacacaccagaatctctgcaatacagctaaggcagtgttaaaagaaaaatttatatcattaaatcctcagatcaaaaagttagaaagatctcagtttaacaacctgacatcataaataaaagactgagagcaacaaaagcaaatcagcccctaagctagcaaaagacaagaaataaccaaaatcagatctgaactgaaggagatttagacatgaaaaactacaaaatatcaagaaatccaggcattaaatctatttaaaaaaagtaaataaactatgagctagattaatgaagatacaaataaacacaattagaaatgacaaaaagagacattaccactgaccccacaaaaatatactgaagtctgctatgcacataaaaaaaaaactagaataaaaaaattattgaacaaatacatcctcccaaaactcaacacacacacacacacacacacacacacacacacaaaatcaaagccctaaatagatagataagctcaaaaaactgaattagtaataagtagcctaccaactaaatgaagctcaggaccaaacatactcacagctgaattctaccagatgtacaaatagaagctgatattatttctaccagaacaatttcaaaagattaaaaagaagaaactcctccccaactcattatgtaagaacagcaatcattctgataccaaaacctaacagagataaaacagaaaaaggcaacttcaggccaatatccttgaaaattgatgcaaaaatcttcaacaaacagctgggcccggtggctcatgcctgtaatcgcagcactttgggaggccaaggtgggttgattccctgaggtcaggagttcaagaccagcctggccaacatgatgaaaccccgtctcttctcaaaacaggaaaaaattagctgggcatggtagcacacacctgtaatcccagctacttgagaggctgaggcaggagaatcacttgaacctgggagtcagaggttgcagtgaaccaagattgcaccactgcactccagcctggatgacacagtgagactccatctcaaaaaaaaaaaagaaatcttcaacaaactactagcaaaccaaatccagcagcatatcaaaaacctaacccactatgatcaactatggtttattttggggattcaaggtttgttcaacatacacgaatcaataaatgtgattcatcacataaacagaattaaagacagaaatcacaagattatctcaatagatgcacaaaaagccttcaataaaatttaacatttttcatgttaaaaaccctcaacaaactaggcactgatggtatacatgtcaaaatagtaagttatctatgacaaatccacagccaaaatactgaatggacaaaacctggaagcattccttcttgaaaactggcacaagacaaggatgccttctctcaacactcctatattcaacataaaattggcagtcttagccagagcaatcaggcaaaagataaaaataaaaggcatccaaacaaaaagagaggaagtcaaactatccctatttgcaaacaacatgattctacatctggaaacccatatactctcagcagaaaagctctttaaactgacaaacaacttcagtaaagtctcaggatacaaaagaaatgtacaaaaattagtagcaaccctatatatcaagaacacctaggccaaatccgaatcgaaaacacaatcccattcacaactgccacagaaaagaataacatatctagaaatacagataaccagaaaggtaaaagatctctatgacaagaattacaaaacaatgcttaaagaagccagagatgacacaaacaaatggaaaaccactttatgctcatgaataaaaaagatcactatcataaaaatggccatactgcttaaataaatctacagatgtaatgctaattcaatcaaaccaccaaaatattttttaacagaactaaaaaaacaactattttaaaattcacatggaaccaaaaaagagcctgaatagccaaggcaatcataagcaaaaacaagaaagctggaggcattacattacctgacttcaaactacacaacagtgctacagtaaacaaagcaacatggtactggtacaaaaacaaactcataggccaatgcaacagaatagggagcccagaaataatgccacacacctaaaaccatctgatcttcaacaaaggtgacaacaggaatgtgggaagaatttcctatttaataaatggtgccagaataactagctagcactatgtagcagactgaaactggacccttttataacaccatataaaaaaatcaactcaaggtaaatgaaagacttaaatgttaatcttaaaaattataaaaaaaaaaaaaacaaaaaaccctggaagataagaagtgccattctagacatagaaactgtcaaagatttcatgatgaagatatcaaaagcaattgcaaaagttgacaaatgggacctaaataaactaatgatcttttttcacagcaaaggaaactagcaacacagtaaagagacaccctacaaaataataggaaatatttgcaaactatgcttctgacaaaggtttactatccagaatccgtaagaactaaaacaagtttacaagaaaaaaaaaaactaacttaaaagaagaccaaaaaaaaaacatgaaaaagatgtttgtcttcaaaaggagacaaacatgtggctaacaagcatataaaaaaatgctcatcactaatcgttagagaaatgcaaaagaaaaccacaacaagaaatcatctcaaaccagtgagaatggcaattattataattcaaccattgtgaaaagcagtgtagtgattcctcactaaactaaaaataaaattaccatttgacccagtaacctcacaacggggtttatacctaaaaatatataaattattctatcataaagacacatgcacaatcacattcgttgcagtactattcacaatagcaaagacatggaatcaacctaaatgcctatcaatggtagactggatacagaaaatacggtatggttgggcatgatggcacatgtctgtaatccagcactttgggggctgagccaggtggattgcctgagctcaggagtttgagaccggcatggacaacatggcaaaatcccatctattaaaaagaaaaattagctaggcatggtggcacaagccttcagtcttagctacttgagaagcttagatagaagaggattgtttgagcctgagtgggtgagtttcagcgagccaagatcacaccactgcactgcagcctgggaaagaaagtgagaccctgtctccaaaaataacaaaaaataaaaaacctaataaaaacaaaatatgggccgggtgcagtggctcacacctgtaatcccagcactttgggaggccaaggcggcagatcacctgaagtcaggagttcaagaccagcctggccaacatggcaaaaccccatctatactaaaaatacaaaaattagctgagtgtggtggcacacgcctgtaatcccagctacttgggaggctgtggcagaactgcttgaacccgggaggtggaggttgcagtgaactgagatcatgccactgcactccagcctgtgtgatacagtgagattccatatcaaaacaaacaaacaaacaaatatggtacataaacatcatgacatcatgaaatactgtgtggccattaaaaaaaaaaaaaagagtatgtcctttgcagcaacatggatgaagctggagatcactattcttagaaaactgatacagaaacagaaaaccaaatgcatgttattatttataagtaagagataaataagaacacatgaacacagaggggaaaaaagacactgaggcctagttgagggtgggaggactaaaagggtcagaaaaagtacatttttggtgctatgattagtactgcagtgacaaaataatctccacaccaaactcccatgacacaattttagctgtataacaaagctgcacatgtacccctgaaccacccaaaaataaaagttaaaagaaaaaaatccctcgattggagagagtgcaatgcaggtggaaggactggtttgtgctatagatagtggcccaggtggggctgtactctgattcatttctgggtccatgcagccagataagattatgaatcctaggctggtggagaaaacaggatgctactgcagattccgtgtctgaaaatagggatatgccaggagacttgtagacacttttgtaggtttttggccaaaaaaaccactaggatcaaaaatgctgtggtaaaattcctgagggtggtgccttgtccagagaggggtgtggacacatcaatgtctagtgggtgtttgtgagtgggtggaaatcctctgctggcagctgtggcaaaagggggtttgtcatcagatctcctttaagttttcagtcttctgtcaccctgggaggagacctggaatcaaagaacaaggggcagtgtgacagcctgtgtagaggagagcagagcttcccattcccagacacccggagtttcattctaggccaggagtctgtgatatctttcttctggcaccaaatctgcagagtttgatgaacaccaacaattctccaacagcaactcattgtctaacacttgaattctgacaccacccagagtcagcacagaccctgattcagggctcagtcccacaacattgtcctcactgcagatgccagtcacaaaccccatgggctcatctatgcttctgacctactgtttaaaaagtggggactcccataacctttttgaaattcagtaatctgatacagctactcacagaactcagcagaacactgtagttatattcactggattcaaataaaatatacaacccccaaaaagtcaaatggaagaaaagtatagaaccaagaaaaaaggtgggaaaagatgaagcatatagataacaaacagctaggattaataaaattctctatcctctgtgttctccaggaacacttatgaaaagaaacacccttcccattgtgacttagatggtgctctcttttcttacctactacacagccaggaaaacactctgcatattttcttttctcgttaaaaaaatcagctgtatttgtcttcagtggtcaacataaaatacttcttaatcaaacttcacttattttcttcccacaggctcctgaactctgagctactctcagtccgagccaccatacaacctcattttatgctactgcagattcagtgtctgaagaacactcctaagaacacactgacttcagggtaaaacattctctgatctaaaatctgattatttcacccttcatttaaatattcccctcaccttctttctaatcttatttgttttctctaggaaaaaaaggccttttctacctaatctttataatccttaaagatcttatagttggtacttcctcctgttgcaatactcctttggaattctttttttttttttaatgtacatctagctggttattttaaaacctctcaaaactgcctcaaaacagtaacaattttatcttcaataagacactcccaaaccccttctatcttaaccttaactgcatctgcctgtggggccccagctttccagggctctgtagcttctctcactatagaggcttcttccatggctgcggtaagcaggctgggacatctgcaggaaaggctttccagaaggaactaaatgggcctttaataacctccgtttgctagctcaaaattaaccttagcttgcagtcattgggctcaagctttaattacatgtcagagtcattcacttagtttttgaaactaagtgtttgaaaaatccagcaaaatgattcaaaaacagtgttcatataagaaaattttaaggtgcttaccttttgtacctcagtaagagaagcaaatgtatttatttcttttggacaataaagcattattttattttttgtattaaaaatcatgaggtaaacagttatatgggaacacttctaggaggtacctagtttcatcacataaaatttaccattaaactcagaaatcaaaataacaggatatagaacaaagatacttacttttgcaaatttaccctgcaaaaaaagaaactgatgttttcacgaatctatgtaactcaccaattatctaccacattttcttgtggaaatatattaattctctatagccaaaacggaagaaaaaatgttcttatttttttcccaaacattccaaaagctagatggaattgtttgaaatcactcagctataaaaagcacacctgagggcagggcgcagtggctcacacctgtaatctcagcactttgggaggccgaggcaggtggatcatgaggtcaggaaatcaagaccatcctggctaacatggtgaaacaccgtctctattaaaaatacaaaaaaattagctgggtgtggtggcgggtgcctgtagtcccagctacttgggaggctgaagcaggagaatggtgtgaacctgggaggcgaagcttgcagcgagccgagatcccaccactgcactccagcctgggtgacagagcgagattctgtctcaaaaaaaaaaaaaaagaaaagaaaagaaaagaaaaccacacctgagaaaactcctaaattcactctgagaaagaaaaaggtgaatgagaattttcaacaaatgaaatatataattagatattattttttgatactcacctttttatgccctttgtaaatattttcttacctttcaagccctactaataagatgcaatttacagttaaaaaactgaggtcagccgggcacagtggctcacacctgcaatcccagcactttgggaggccaaggcaggcagattacttgaggtcagaattttgagctcaaacagcctggccaacatggtgaacccccatctctactaaaaatacaaaaagtagccaggtgtggtggtgggcacctgtagtcccagctgcttgggaggctgaggcatgagaatcacttgaacttgggatgcagaggttgcagtgagccgagattgcaccaccgcactccagcctgggcgacagaggaaaacactgtctaaaacaaaaaagtccgtgtgcggtggctcacgtctgtaatcccagcactttgggaggccaaggtgggtggatcacgaggtcaagagttcgagaccagcctgggcaatatggtgaaattccatctctaccaaaaatacaaaaattagccaggcatgtgggtgcacgcctgtagtcccagctacttgggaggctgcggcagaagaattgctttaatccgggaggcggaggttacagtgagcagagatcatgccactgcactccagcctgggcgacagagggagactccatctcaaaaaaaaagaagaagaaaaaaaactaaggtcaaaataagtgaacaaatcatttaatcgtttcaaggtagagatatgtctgattcatgtgtcaagtcaggtcatccaattactgagagattcagccaccccatcctgttcacttaagtgctcaataatcattctctcaggagactctgaactatgccccagtgagtgccccaggtacattttactttgcaagttcttgcaccatctcactggggtcagtttctttttctttgtctttggagtgctatttttttccacaaactttttaccatttttctttcactatttttctgtcccctaggagaatccagaggcaaaaattattttggtttccccttcaataccggcatctgattgtctgaacagcaatgtgtctccaagaaatggaagctgggttgggtaaagacaatactaatacctcaaggggttagctttccaaaaaaacagggcaccagtagatgcctctcagccccagggcattcacctgctctcctgaaaggctacattccatacctcgggttgtcctacaggagatgagaggctacactccatacctcaggttgtcttatgaaagataagaggctacactccatacctcaggttgtcttatgggagatgagaggctacactccatacctctggttgtcttatgggagatgagaggctacactccatacctctggttgtcttatgggagatgagaggctacactccatatctctggttgtcttatgggagaaaatgacccaggagctgatattcactagatactcttgcagacacagccatggccagtatcttggtttttccccagacagtactgaatctcaggtccaaggaaaaaactgaagggtggctgaggacacgtctccctataacttttccaaagggaaaccctgacccaaaaaacattctgataagatatctgtgtctagggaaactagaagaaaaaaacatttacaaacagaaaacaaatctttttaaatgtgccatcaaatgctttgtcaaaaaatgattacaataggtatcaaaatgtacactaaaggacaaatagttgatcatgtgaataagggaggggaaactggcatttgggaatgtcagaaggaactggaaattaagtattttactgcaagtcagagtcaggctggagaaatagggggtggcagatagacttgaggccctgcttgggacacatgtgaaaaatgcaaggaaacagcagttccctgtggggtgtgaaaataattaagtggctggcagttagactgaggaggctttatttcctaatttctacttttaaaaaatctaattcggccaggcgtggcggcttacacctgtaatcccagcactttgggaggccgaggcgggtggatcacttgaaatcaggagttcgagaccagcctgaccaacacggtgaaaccccgtccctattaaaaatacaagtggcacatgcctgtaatcccagctacttgggaggctgaggcaggagaatcgcttgaacctgggaggcggagagtccagttagcctagatggcgccattgcactccagcctgggcgacaaagtgagacttggtctcaaaaaaaaaaaaaaaaaaaatctaattcaaatgtattttttttaaattactacattgggggaaaaaaattcaggcttaacacactataaactgccaattaacctctgattacataaccaagaaatttccatcttcatgttacaaattaagaaaccatgaggctgggcgccatgactcacacctataatcccagcactttgggaggctgaggcgggtggatcatgaggtcaggagatcgagactaccctgactaacacggtgaaactccgtctctactaaaaaataccaaaaaattagccgggggtgttggcgggcacctgcagtcgcagctactcgggaggctgaggcaggagaatggcgtgaacccgggaggcggagcttccagtgagccaagattccgctactgcactccagcctgggcgacagagcgagactccatctcaaaaaaaaaaaaaaaaaaaacaacaaaaaaccaggaaactacataactgtacctaaccaattattgaatgtggttttcttcattatgcaccttataaaactctttccatcaaaccccttcaatagaccataaactacaatccatagttgggtgctctacaattttggaatcactcttaaattatttaatattttttcggcgacttccataaatttttaatgggagaatacaggaactgggagcctcacggaccaaagctcttcccattcatgaacccacacctcaagtcaggattctcctctgactaccctcccacagtccgtgcacaatctgggagagactccgcgctgagggtgcagagctgccccaagagggctccaggccagggcacaatcacagcgcagggaagagacaggacgcccggcggcccgcgcagccgccatcttatggctgaaggggactgaggtcgagctaggcaaggagaacttgtggagctgactgcgggtaggcttgagtcccgccacagccacttcccgccggttccaaccagcccaggccactctctcagtgtgtcggacccggcacactcaccatttctaggcttccagggggtcctggcgacttagttgtggatctcccaatacctgcaggtcatagggccacagaggctgggactctaggaacagtaaggacaaggcctttacctccggctgcagcgagagacaaaggaccgaccacatcccggaagccgacctgtccccccccccagctgcctgcctgattggacattcccagcccagcatccctgattggataatgtttaaggccccgccctttcaggccctgagtgacagaagatgtgatcagatgctgggctgaatgaagaaagagagccaacgtaggctgcagccttttcaggcagggcttcctccctgagctgagccaggcctaccccagagcatgggaaaattctatctcttctttattctctctttttaaatgtatttgaaatgtgaacaaatatattttactgtcatgttaataatacataaaacttttgtacaagagtaaatcaatttttactttagtaatagtgtattatcaatactaaaggctgggtgcagtggcttacgcctttaatcccatcagtttgggaggccgaggcgggtggatcaccggaggtcagaagttcaagatcagcctggttgacatggtgaaaccccttctctactaaaaatacgaacattagtcaggtgtggtggtgggcgcctgtaatcccagctattcaggaggctgaggcaggagaatcatttgaacccgggaggtggagattgcagtgagccaggatcaagccattgcactgcggcctgggcaacaagagtgaaacgccagctcaaaaacatgggcaacaagagtgaaacgccatctcaaaaaacaaaacaacaaaaaagctaaacctaatgttagtaaaaccttataaataaatccatgaaatttgtcatttttgaacactctagatgttcatatatattttacaatctcatatttaactttttctattttattttaatagcctttttttttaacttgaaacaaccttaagctgttttttgagacgagtcttgccaggctagagtgcaatggcatgatctcagctcactgcaacctccctctctgggttcaagcgattctcctgcctcagcctcccgagtagctgggattacaggcgcccaccaccacacccagctaatttagcatggtagcctcaccctgtagtaccagctattcgggggctaaagtaggaggattgcctgagcccaggaggttgtggctgcagtgagccctgatcaagccactgcactccattctgggtgacaagagtgagactctttctaaaaaaaaaaaaaaagccaaaacatataaacttaaacttatgggagtttggaggtttttatttttgtcttaaattattatatttcaatagttttggggtacatgtagtatttggttacatggataagttcctaaatcttttctgagatttaggtgcaccaatctcccaagcagtgtgcactctacccaatgtgtagtctttcatccctcaccccctctcctacccttcccactgagtgcccagagtccactatataattcttttttttaattatatttatttattgagacagagtttcgctcttattgcccaggccggagtacagtggcgcgatctcagctcaccgcaacctctgcctcccaggttcaagcgatgctcctgcctcagccttcccgagtatctgggattataggcatgtgccaccatgcctggctaattttgtagttttagtagagacagggtttctccatgttggtcaggcttgtctcgaactcccaacctcaggtgatcgcccacctcagcctcccaaagtgctgggattacaggcgtgagccaccgtgcccatccccattacataattgttatgcctttgcatcttcatagcttagctcccgtttataagtgaggaaatacaatatttgggtttgtatcccctagttcttttttccttttttttttttgagatggagtttgctgtgattacaggcataagccaccgtgcctggcctattttttgatgttttaattatggtcttttctgtttgtttgtttgtttgtttgtttgtttgtttttgacatggagtctgtcacacagactggactgcagtggtgcgatcttggcttactgcaacctccacctcccgggttcaagcgattctccagcctcagcctctggagtagcagggattacggacacactccatcgcgccctgctaatttttgtatttttagtagaggtgaggttttaccatgttggccaggctagtctggaactcctgacctcaggtgatccacccgtcttggtctcccagagtgctgggattacaggcatgagccaccatgcccggccaatgatggtcattcttgcaagagtaaggtgatatcacattgtggttttgatttgtatttccctaatcattaatcattagtgatgttcagcatttttttttaatgtttgttggccatttgtatatcttcttttgagaattgtttaagtcccatctgtctttgtttttgttgcatttgctttgaggttcttggtcatgcactctttgcctaagtcaatgcctaggagagttttttcaatgctttagaattcgggtagtttcaggtcttagattaaagtatttgatccatcttgagttgatttttgtataaggtgagagatgaagatactttttttttatttttatttttttgagacggagtctcgctctgttcccaggctggagtacagtgtcatgatctcggctcactacaacctctgcctcccgggttcaagcaattctctgcctcagcctcccaagtagctgggattacaggcacctgccaccacacccagctaaatttttttttttttttttgtatttttagtagagacggggtttcaccatcttggccaggctggttttgaactcctgacctcgtgatccacccaccttgacctcccaaagtgctgggattacaggtataagccactgcactcagccgaagatccagttttattcttcaatatgtggcttcccaattatcccagtaccattctattcaatagaatagggtgttatttccccacttcatatctttgtttactttgtcaaagatcagttgactgtaagtatttgggtttatttctggtttcactattctgtttcattggtcttcatatctatttttatacccatacaatgctgttttggtaactataaccttgtagtatagtttgaagtcagataacgtgatgtcttcagatttttttgtgtgtttttgattttgttgttttgttttgttttgttttgttttcctagtcttgctttgactatggaggctctctttttattttatataaattttaggattttttttttttagttttaggatttttttttttttggtatcctgaaattttactgcatttatgtatcagatcgaaaagttttttgttttgtttttttttctttttgagacaaggtcttactctgtcacccaggctggagtgcagtggcatgatcttggctcactgcaccctctgcatcccaggttcaagtgattctcctgtctcagcctcccttgtagctgggattacagccacttgccactgcaaccggctaatttttgtattcttagtagagatggggttttaccatgttggccaggctggtcttgaactcctgacctcaagtgatccacctgcctccatgtcccaaagtgctgggattacaggcttgagccactgcatccagccctaaaagcttttttagttgagttttagggtttcccaggtacacaattatatcattggtaaacagtgacaatttgacttcctctttaccaatttagattctgtttattttttgctttactctgattgctttggctaagacatccattactgtgttgaatagaagtggtgagagtgggcattattgtcttgttccagttctcagaaaaaatcctttcaactttttcctgttcagtgtaatgttggctgtttatcacagatagattttttttttttctcggacggagtctcgctctgtcacccaggctggagtgcaatgtcaggatctctgctcactgcaatctccacctcccagactcaagcgattctcccgcctcagcctccccagtagctggcaccacaggcacccaccatcatgcctggctaatttttgtatttttgaacagacgaggtttcaccatgttggccaagctgatctcaaactcctgacctcaagtgatctgcccacctcagcctcccaaagtgctgggattacaggcatgagccaccacgcccagcctgtcatagatggtttttatgaccttacaatatgttccctctatcccgattttgctgaggattttaatcataaagtgatgctggattttgccaaatgatttttctgcatatattgagataatcatataatttttggttttaattctgtttatttggtgtataacatgtattgacttacctatgttaaatcatctctgcatccctggcataaaatgttcttgattatggtgtactatcttattaatatgttgctgtgtttggttagctagtattttatggaagatttttgcatttatgctcatcaggaacattggtgtgtagttttcttttattatgtcttttcatgatcttggtattagagtgatactggcttcatagaataatttaggaaggattccctttttctctatcttttggaatagtttcagtaggactggtaccaattctttgaattttggatagaattgagctatgaatccatcttgtcctggacgttttttgttggcagtttttttttttttttttcttgagtcttgcgctgtcacccaggctggagtgcagtggtgcgatgttgactcactgcaaacttgcctcctgggtttaagtgattctcctgcctaagcctcccaagtagctgggattacaggcacaaaccaccatacctggctaatttttgtatttttagtagagatggggttttgccatgttgatcagactggtctcaaacacctgacctcaagtgatccccccacctcgtcctaccaaagtgctaggattacaggcatgagccactgaacccagctggcaatgttttattactagtttaatcttgctacttgttattggtgtgttcagagtttttatttcttcctgatttaatctaggagggttgtatatttccaggaatttatcaaactcctctaggttttcaagtttgagcatgtaaaggtattcgtagcagctttgaatgatcttttatttctaattgagcatatttggatcttctttctgcttttctgggttaatcttactaatagtctatcagttggatttatcttttcaaataactagcttattgttttatcttttatattttttaaaatttcaaatttatttagttcttctctgatctttgttattatttttttttcctgctgggtttgggtttggtttgttcttgtttctcttgttccttgaggctaaacaatctcaggttgtttattgtggttttttgaactttttgatgtatgtatttaatgctatgaactttcctcttagcactgcttttgctgtatcccagatgttttaatatgttgtgtcactattattcaatttaaataattatttaatttccatcttgatttcattgtggaaccaattattcatgagcagtttatttaattttcatgtatttgtatggttttgagtgttcctatttgaattgatttctaattttattccactgtggcctaagacagtacttgatataattttaatattcttaaatttattcaggggctgggcatggtggctcatgctttaatcccagcactttgggatgccaaggcaggtggataacctgaggtcaggagttcaaaaccagcctggtcaacatggtgaaaccccatcgctactaaaaatacaaaaattaggcaggcatggtggcacgtggctgtaatcccagctactcagaaggctgaggtaggagaatcccttgaacttgggaggcagaggttgctgtgagctgagattgcaccattgcactccagccttggtgacagagcaagactgtcacaaaaaaaaaaaacatcagacttgtcttttggcctattatatggtctatcttgaagaatgttttatgtgctgatgaaaagaatgtatattctgcagttgttgggtagaatattctgtaaatctctgttaagtccatttgttctaaggtgtagtttaagaccattgttttttgtttgtttgtttgtttgttcatttgactttctgtcttgatgatatgtctaatgctgtaagtaaagtaaaaaagtcccccaatatttttatgttgttgtctctctcattgcatttcttaagggacaacttaggtgaaacaagaaaatttatacttctgaagcacagaactaacattttaggctaaaatatattttttttttctttgagatggagtctcactctgtcgcccaagctggagtgcagtggtgtgatcttggctcacttgcaacctccacctcctggctcaagtgattctcctgcctcagactcccgagtagctgggactgcaggcacctgccaccacgcatggctaatttttgtgttttttagtagaaacaaggtttcaccatattggccaggctggtttcaaactcctgacctcaggtgatctgcctgcctcggcctcccagagtgctgggattacaggtgtgagccactgtgcctggccttaaatgtactgtttatgttttttttaatatataagattaaatgatttgcaaacagcaactttttatttatttgtcttcaatttcaatggctttaaacaatttttttgcctagttcttctgccatgtacttccaggtttatgttaaagtagaagcattgacaatggggacaatatagttttgcattgcattggtttttgtaaatttcgtggagcaaaagcctgttcaagtttatataaactggttacaaggggtaaaaatcttcttctgttgggcccccatatttataggatgccctctttatttgtaatagagagaggtggtaaacgcagcaaagcagctgcgtctgcataggatttacctttagttggcttgttacaaaaggcttgggtagttgtaattcccattttattattgaacagattgaatatccttcaggactttcatctgtagagcagacactaggggaagttgttgcagtcagatctgcatatggtggggcttacatcaggatgtggatgaggatgcctttcaccaagtactagagagggtcttcccaggtcactgtgtgggattctacctaggcagaattggccataaactgtggattggagttagaactaaaacattaaactgtatggctacaaatgggtgtcttcctccaggcctctggaagggcagaagctctcccaggctgtggctgggaggagtttggaatggttataggataagttcagaattctcagtgggagcaagttgagttggctattttttgggttgtggccaagaacagaaatcctgtagtttgccaccttagtggaagcctgtctcctgaaaagaatgttcctcaatcttgggctttagcagagtttcacaactccgtccctggatctcaaagctcttttgaaggtacttgttttagagatgaagtctttctacataacacaggctggtcttgaaatcttggcctgaagaaattcttcaacctgaatgttttatgtagctatcattacagatatgagccaggatgcctggatctctcataaacacatttttgtcagggctggctcacagttttcttgctgtcgggggataagaaaataggtcaccttttttttttttttaaattttactgatgtcgctctccctatacatttttactttgtatttcctatttcaaatttctctgttattttagattcagacatttaggataatatgttagaatttacatgttatgcctgaaataaattagattattagtaggcattccttatttactaaaatatttagttataaatttaagtttgctgcaggcagaaaggaattatatgatttccattcactttcttcagcctatatttaaataataaaataagttcttccctgataattgttttatatatcagaggctttaattatattctgcagactttttttttaatttaacaaagtaagactattctttgcttctaaagttaaattacagcagtttcattttgtgtaagaatagcacatattctttaagaatatatgtagcatatattgtgtaagaacagcatatataacgatgaaatttacctctagttttctttagtgcttatttattaaaagcttatcattagaatcttctatttatgattatactgcaatttctcttaagttttactgccatgcagtgcatgccgatgactcaaaatacctgccttccatgagtacacagacacagtcaaatattgtagttatctagacaaatttttgtaatggtacatcaatgttgcatactagatctgatgagtaaacatttctgttattattattttgcagttctatatgtgtgctttttagcgtcagtttcttaatatcagtgaattttttttgttttacgtattataattctagacaatttgcaattctgtttgtacactttaagtcaatgtggggtttaattgagaaataaattagccatatgtctatcacaatcagattatatatttgtgtgtttttatctataaatatgactccaattatggttatggcttatcttgtatatattctttcttagctgattttcagtggttgttttatcttgtctaagtgagtagttgtggaaataatcttatttttgccttgtgtttaataatgaatatatattttctttgtgtgagagaaacacttttgtgatttgaaggtaattctagaaaagatttataattcttcatttagtttttcttctaaaataatttttgtaaaaacagataacataaaattgattctctaaaatctatttaagtgtacattttatggccaggcatggtagtggctcacctctgtgatcccagaaattcgagaggtcaaaacagaaggatcacctgagcccaaatgtttgagatcagcctgggaaacatataaagacctgctgtatccaaaaaaattttaaaataacaagccatggtggtgtgcacctgtggttccagcaacctgggagatcaagggaaaaggagtactttatcctgggagtttgaggctgaagtgagccataattttgccactacacaccagtttgggtgacaaagtgagaccctctgtcaaaaaaaaaagctgtggatttcaggcatgttaaagtatattcacctggttatgcaaaaggcttctagaggttttacatcttgtaaaactaatactcaatacccactaagtaacaactgcccattttaccctctctccagcccttggcaaatatctttcagctttctgtttttatgagtttggctatttaacttatctcaggtaaatgaagtaatgtagtattcatcattttgttactggtttatttcatgtgacatagtattttcaaagtttatcttaaaatgtgacaaaattttctcttttaaggctgaatgatattccatgtatgtgtatgttaaattttttgatgtatttataaatcaagggacatatagattacttcagccttttggcttttgtgaaatctggtacaataagcataaatgtttacatgtctcctccaggttctgtgttgcatactttggaaatcaatttataaataagattgttgtaattgattacaattttatttttaattatctgaggaacatttataacattttaaaataatggctgcatctttgttttccaccaacaatcagcataggtttcattttcatagcatcaccaatagatctggttttcttaaaaaattgatagtggccgttccaatgggtgtcaggttattttgtatttcactgtgatatttatgcattcctctacaaattagtaattttgtgagtcctgtcaaatgctcttcccatttatgcttttgataaaaatttagtttaattagttttccatttctaaatcctgttattcaactttattgttcagttttaagagttgcttatatattctgaatattaacttctatcacatgtgatttgcaaatattttcattgatttcctaagtggcattgtcactctcttgaagttttttttgatgtgcaaaaattttgaagtatatttcagttaaatttttctgttcttttcattgttgcttatgcgtttaatgtcatctaagaaaatgattccaaggccaatgtcatgtcttttctccatgtttttttaagacacttattagctattttttatatctaagtattttatataaatttttttgtctatggttcaaggaaagaatccagctttatcagtatagatattcagttttcagcattaatttttgaagatattatcttttctctattgtgtgctcatggcagctttgtggaagatcattatttacagaagggttcatttctgggctctctattctgatttatcatctgtttatctgtctttgtgtcagtactatattgttttcattatagcttttaatatgttttgaaatgggaaagtttattacctcctctatttcatgggtgtttggctagttatagttaataatcaaattttaaaatgttaaataatatttctgtttaaaaatcctgtgctattaggaattttatagaaattacgtcaaatttgtttaccactgtaggttgtactgacatcttaaaaaattaaattttttgactcttgagcaagaatatgttaaagagtgttttatttttattttatttatttatttattttatttagagagagaagggatcttgctttttttttttcctttgagacagagtctcactctgtcatccaggcaggagtgcagtggcacaatctcaattcaacacaacctccaccttctgggttcaagtgattctcctgcctcagcctcctgaatagttgggattacaggcactcaccaccatgcctggctcatttttttgtatttttagtagagacgaggtttcaccatgttggtctggctggtctcaaactcttgatgtcaggcaatccacctgcctcggcctcccaaagttctcgggttacagaggtgagccactgcacccagctcatgtgtttaatttttatatacttttggattttcctgttttacttttaccttaggttcaaataatagcatcagcaaatctgtcctgccaaatgaaaagaggaaaacctttcaaaataaccaaattttgaaagagcatactggcactgcatatgccctataaagaatgctgaaaagcatcccacttattctaaaattgaccacataattggaagtaaaacactcatcagcaaatgcaaaagaatggaaatcataacaaacagtctctcataccacagtgcaatcaaattaaaactctggataagtaactcactcaaaaccactcaactacatggaaacagaacaacatgctccagaatgactactggggaaataatgaaatgaaggcagaaataagtaagttctttgaaaccaataagaatgatgacacaatgtaccagaatctctgggtcacagacaaagcagtgcttagagggaaacttatagcactaaatgctcacaagagaaagcaggaaaggtctaaaatcaacatcctaaaatcacaattaacagaactagagaagcaagagcaaacaaattcaaatgctggcagaagacaagaaataactaagattagagcagaactgaaggagatagagacacaaaacacccttcaaaaaattaatgattccaggagctggttttttgaaaagatctacaaaatagatagactgctagccagactaataaagaagaaaagagagaggaatcaaatagatgcaataaaaaataatcaagagggtattggcactgatcccacagaaatacaaactaccatcagataatactgtaaacacctcaatgtaaaaaactagataatctagaagaaatggataaattcctggacacataccctctgaagactaaaccaggaagaagtcaaatccctgaatagaccaataacaagttttgaaattgaggcagtaattaatagcctaccaaccaaaaaatacctgggaccagacagattcacagccatattctaccacaggtacaaagaggagctggtaccaattcttctgaaattattccaaacaatagagaaagagggactcctccctagctcattttgggccagcatcatcctgataccaaagctggcagagacacaacaaaaaaagaaaacttcaggccaatatccctgatgaacattgatgtgaaaatcctcaataaaatactggcaaactgaatccagcagcacatcaaaaagcttatccaccatgatccagtcagcttcatccctgggatgcatggctggttcaacatacacaaatcaataaacgtaatccatcacataaacagaacccatgacaaaaaccacgtgattatctcaatagatgcagaaaaggccttcaacaaaattcaacaccccattcatgctaaaaactctcaataaactaagtattgatggaacatatctcaaaataataaaagctatttatgacagaccacagttaatgtcatactgaatgggcaaaacctggaagcattccctttgaaaactggcacaagacaaggatgccctctctcaccattcctattcaacatagtattggaagttctggccaggacaatcaggcaagagaaagaaataatgagtattcaaataggaaaagaggaagtcaaattgtctctgtttgcagatgacatgattgtatgttgagaaaactccatcatctccgccccaaatctccttaagctgataagcaacttcagcaaagtctcaggatacaaaatcaatgtgcaaaaatcacaagcattcctatacaccaataacagaccaacagagagccaaatcatgactgagctcccattcacaattgctacaaagagaataaaataactaggaatacaacttccaagggatgtgaaggaccttttcaaggagagctacaaaccacagctcaatgaaatagaagaggacacaaacaaatggaagaacattccatgctcatgataggaagaatcaatatcatgaaaatggccatactgcctaaggtaatttatagacccaatgccatccccatgaagctaccaatgacttcacagcattggaaaaaactactttaaatttcatatggaaccaaaaaagagtccacattgccaagacaatcctaaacaaaaagaacaaagctggagacattacagtacctgacttcaaactattgtaaaaggctacagtaaccaaaacagcatggtattggtatcaaaacagatatatagaccaatggaacagaacagaggcctcagaaataacaccacacatctacaaccatctgatctttgacaaacctgacaaaaaacaagaaatggggaaaggattcccaatttaataaatggtgttgggaaaactggctagccatatgcagaaaactgaaactggaccccttccttacaccatatacaaaaattaactcaagatggattaaagacttaaatgtaacaccccaaaccataaaaaccctagaagaaaacctaggcaatgctattcaggacataggcatgggcaaagacttcatgactaaaacagcaaaagcaatggcaacaaaagccaaaattgacaaatgggacctaattaaactcaagagcttctgcacagcaaaagaaactatcatcagagtgaacaggcaacctatggaatgggagaaaaattttgcaatctatccatctgacaaagggctaatatccaggctctacaaagaacttaaacaaatttacaagagaaaagcaaccccatcaaaaagtgggcaaaggataagaacagacacttctcaaaagaagacatttatgcagccaacaaacatatgaaaaaaagctcactgtcactagtcatgagagaaatgtaaatcaaaatcacaatgagataccatctcacaacagttagaatgtaatcattaaaaagtcagaaaacaacatatgctggggaggatgaggagaaataggaacactttcacactgttggggggagtgtaaatcagttcaaccattgtggaagacaatgtgacaattcctcaaggatctagaatcagaaataccatttgacccagcaatcccattactgggtatatacccgaaagattataaatcattctactataaagacacatgcacacgtatgtttgttgcagcactattcacaatagcaaagacttggaaccaacccaagtgcccatcagtgatagactggataaagaaaatgtggcacatatacaccacggaatactatgcagccataaacaaggatgagttcatgttctttgcagggacatggatgaagctggaaaccataattctcagcaaactaacacaagaacagaaaaccaaacactgcatgttctcactcataagtgggagttgaacaatgagaatgcatggacacaaggaggggaacatcacacactgggacctgtcagcgggtggggggctaggagatgaatagtattagaagaaatacctaatgtagatgatgggttgatgggttcagcaaaccatcatggcacgtgtatacctgtgtaacaaacctgcacattctgcacatgtatctcagaacttaaagtgtaataataaaaaaggaaaaaaaagaatgctgaagagtttcttttattgaaaataaaatgactcaagaaaatgacacataatcatatctatatatgaatgcatatatatgtgtatatatatgtatgtatattatatatatgtatgtgtacatatatatgtatttgtatatatatatatttttttgagccgagttttactcttgtttcccaggctggagtgcagtggcctgatctctgctcactgccacctctgccttccagtttcatgtgattctcctgcctcagcttcccaaatagctgagatcacaggtgtccgccaccacacccggctaattttttgtatttttaggagagatggcgtttcaccatgttggccaggctggtctcgaactcctaacctcctgatctgcccacctcagattccaaaagtgctgggattacaggcatgagccactgtgcctggccaaaaaaaaaaggggggattattttcttggatagatattcacatacaaaaaaatgaaatttcttagcataatcataatggtgcagaaaacatttttaagtattttctataatttgaaaaaaatttagaaaacaatgaaaattttgagagtaaaatctttgtatgcaactgaagttcatcttctaccaggttaaaatgtagttatatcttttagaagttttatgtaatttccaaagtaccacaaggtatcacaaaaaaaaatctgtatagatatgcaaaacaaaataaggaaaaagtaaaagcatatcagtacaaaaatcaaaacgacacaaaggaagacacagagagaaaattagagacaaagatacaacaatcaaatgaaacaataaaataacattattaagtctttctgtttcagaaagttatttaaacatgtatataaaatgaacttaattcagagacatacatttaataaaggaattagataattttaaaaaccaagatgcaacttgcctttctataatagagtcatcagagatctaatgataaaaaagactgatagtggcaagatggatgtagatattctatgcaaatattaattaaattagagcagaagaggtcaaaataatgttactttagctgtatctttatttatttatttattttgagatggagtcttgctctgtttccaggctggagtgcagtggtgtgatcttggctcactgcaacctctgcctcctgggtccaagtgattctcctgcctcagcctcccaagtagctgggactacaggcgcgtgccaccatggccagctaatttttgtattttcagttgagacgggttttcaccatgttggccatatagtctcgatctcttgaccttgtgatccacccgcctcagcctcccaaagtgctgggattacaagcgtgagccaccgcgcctggccttgagctctatcttaagtcaaaaaccgtcatattttataaaatgtttttttaagtcaaaactctacagagacaaaacaagccattacaaaataatagatttatttactgggaacctataacaaatttgtatatctgtgtgtgtgtgtgttttgtgcaagtgtgtgtatgtgtatctcacattaggcttgcaaaatatataaatcaaatattgacagaattgaagaaacacatagagaacaatatagttacaatagcatatttcttttcttttcttttcttttttttttagacggagtctcgctctgtctccaggctggagtgcagtggtgtgatcttggctcactgcaacttccacctcccaggttcaagtgattctcctgcctcagcctcccgagtagctgggagaacaggcgtgcactaccacccccagctaatttttgtatttttagtagagacagggtttcaccatgttggccaggatggtcttgatctcttgaccttgtgatctgcctgccttgtccttccagagtgctgggaatacaggcatgagccaccacatccagcctacagtagcatatttcaataccccattttgtataataaaaataaaaccagacagaataatagtaagagaacagagaacttgaagacaagtataaaacaatcattcctaacagaggtatagagaacactcctcaacaatatcaggatacacagccttcccaacagctcataaaacattctgcttgatagaccacctgttaggccaaaatagaagtcttaacataatttttaaaactaaatttatatggattactttctatcaccaaaatgaagtgacagtatgaaacaataatagaaaaaaaaacctgaaaaaagtataaatatatagaaattaacacactatgagcatgctcctgttcaaaggttgagataaatattttgaagatatccatactgttcaatgtaaactacagatttaatgcaatgttctttaaaagttcacactacattttgaagaaatagacacagcaactctaaaagtatatggaatctaatgagacaataaaatacccaataatcttcaaaaaaagaaataatgttaaaggcattacagttcctgattttaaaactcattacaaatctacaaaattaaaacaatttggtgtgagtataaaagtaaaaatgtagactaataaaaatcaatgcagcacatatataaaatttaacatatatattcatatgaagaattatttacatgctcataataattgcagcattgttacaaatttttagtagaggccgggtttcgccatgttgcccacgctggtctcctaggctcaagtgatccacccatcgctgccttccaaaccgctgggattacaggtgtgagccatctcacccggcccaatttattttcttttttaaggttttttttctgaaaattttataatattttggatgggaatgtattgccctgttttgtatacattgtaatctttgattgatatttggacattttttaaaaagctacctgtcacaatctttatcacgtagctttgtcctggcatagtctgaaaacaattgtctttgctagagattctgggagtctttcaaacatgttcttaggatgtgtcttgtctgaaatttgttgtttattttttagttaaagaagtttattaatctttcttcttaatagtcttcacttgctacacctgttccctgtctgtggtactgcagtctctctgctgctgtaacatttacctctggtctcagcagacccaaattgtcactccaaagtataccaccatttcattcagcactttgtcactttgtgacctctgtctctgccaccatgaccattttgttcatggacctattgggcaatgacaggggtagctggggaaagatgctgagtgatgtcaacaaaacaggtcatcctatccacttgattatcaaaatcctcctctgctgaggtcacccattggttagcactcacatgggatacaaatatcttcacagtttttgaccactcaggaggtccatccacatacctcttccccaaatttctttgtcaccaatttttcaatggtgcttcttccaagtccctggcaatccagtcaaaccattggctaaagcccatgattcagtatgtaatcacacatctggccattcctccttccatgcaaagtgcacaaccaggtgcactgctcaaaattctgcccactgggaagacttcccttcaccactgtctttcagggatgtcctagaaaggaactgtagcgccacagctgggtccactttcaggtggtgccttcatattatacagaaccgtctgtaaatgaggccatagtcttttcttcctctgtcaaatgatcatagggaactccccattaggtcatcagtgcaggctgggggagagaaggcagggtggcagaaatggagaccatgggcatttgagccacttcctcatgtaacttacttgtgccttcagaacctgctcaagcccgatcacatatataccacatccatttgatgatggaatgctgttgtgcatgacccactttgtggttagatgggtcagaaagcacccagttcatgataggcagttcaggtcgcatagtgacttgataaaacatagtcaaacgttcagtttttaccaaagcccagtaacaggccaagagttgtctctcaaaaggagagtagttatctgcagaaaatggcagggctttgctccaaaatcctagaggctgccaggtgcagtggctcatgcctgtaatcccagcactttgggaagccgaggcaaacagatcacctgaggtcaggagtttgagaccagcctggccaacatggtgaaaccccaagtctactaaatatacaaaaattagccagacgtagtggtgggtgcctgtaatcctagctactcaggaggctgaggcaggagattgcttgaacctgggaggtggaggttgcagtgaggcaagttaatgccattgcactctagcctggatgacaagagcaagactccatccaaaaagaaggaaagaaagaaagaaagcaagagaaagaaagaaagaaagaaagaaagaaagaaagaaagaaagaaagaaagaaagaaagaaagaaagaaagaaaagaaaagaaggaaggcagaaaggcaggaagaaggaagtcaggaaggcaggaaggcaggaagaaggaagtcaggaaggcaggaaggcaggaaggaaggaaggaaggaaggaaggaaggaaagaaagaaagaaaaaaactctagaggcctctgctgtgattcacctgagaaggcttgccaaaggctgcaaatagcatctttatttttcaccgacacctcaagatccattggatctcctgggtaatatggcccaagtggcagagcagcttgcacagcagcctggacctgttgcagagccttcttcttttctggaccacactcagaactggcagctttttgggtcactcaataaatgggccagagtaacacacccaaatgaggaataggttgcctccaaaacccaaataggcccactagacattgtgcctctttcttggttgtaggatgggccaaatgcagcaacttaccttttaccttagaaggaatatcttgacaggccctggaccactggacccctggaaattttactgagctagaaggtccctaaattttagtcagacttattttccatcctctggcatgcaaatgtctcatgaataagtctggtgtgtttgctatttcttgctcactggattcgatcagcataatgtcatcaatgcaatggacaactgtgatatttgcaaaagcaaaaagcgatagaggtctctttgaataagattatgacacaaagccagagagttaatatatccatcaggtaggacagtaaaggtgtattgctggccttgccagctgaaagcaaattgcttctggtgggccttatggacaggaacagagaaaagggcatttgctaagtcaatgtctgcataccaggtaccaggagatgtggtaatttgctcaagcaatgaaactacatctagtatggcagctgcaattggagtcatcacttggttaagcttacgataatccactgtcattctccaaaatccatctgtcttctgccaaatgaaagagttgaatggggatgtggtaggaatcaccacctttgcgtctttttagtccttaatggtggcactaatctctgaaatccctccacggatgcaatattggttttgatttactattttcccaggtagaggcagctctaatggcttccatttggcttttcccaccctaatagccctcaccctactactcagggagccaatgtaggagttctgccatctgctaagtatgtctatgccaattttgcattctggaactggggaaatgaccacagagtgagtcttgggacccacttgatcaactgtaagttggacctgagctaaatttctattaagtacatgacctccataagcctctactttaactggaggaccacagtgatgttttgggtcccctggaatcaatgtcacctcagagccagtgtttaatagtccccaaaatgtccaatcatttccctttccccaatgcacagttaccccataaaaggccagagatctccttggggaaagatgggagaaagattcactgcataaattgtcattagtgtagtgggctcgttcctcaagggaatctggcctctcctttattcaaggagttctgggtctgtaaactggctcaagtctggaaattgattgaggggccatgattctctgtttttatatttaaaattagtcttttttccatttgacctagaagttttctgcttgtataaattaagcaggaatgtagtaggtttcctatcaattttacttctaagatcactgtgatgaatcagccaatgctggaactctacagaagtcagactattctgattgccgtttagcctctgctgtccattacagtagctatgcccaccttgcctttgatggttgagtgccaccacttggcccctgccatcatgggatccaattattcccactgtatttaaattttgtagttgagagaccacggttcccactgttagatctgacatgcagagaaaagtaattacaaggttctttaaagattcaggtgctgctttcacaaatctattttgaagtcagtggtcaagggtatatcttctggactttccatgctggaattagtaggtctaaagtgactaatccactccagtatcccaatgtgcctaagccttttgattcctccctctacattaagccaaggggcatcaggcatttccagctcactcacaggggggccatcttttaatccatatttcagctaaccaagcaaataaactattagaagcttttttaactccccaagctgcaacattaaatgcagtattcctacttagtgggtccaaataaataaattcagcctggttcaactctatgttccttccaccataatcccacacccttaatattcatccccaagcctgttctccagatatctgtttatataaattagaaaactcaagcagttctttctgagtgtagtgtacctcctcatggggcacactctcaaactcacctctagggggccgctgggactttagtctacttatatgcctagaagcaaacaggggtgttgagggtgggtcctgagaagaatcaacattattttgcctggcaactttctcaggggaggccatcacagttgcctcaggcagtgcagggtttatctcagacaaaggtggaaaggctgatggcagcatgcatcagaaaggggatgttgccactactggggatggggaagctgttttttctgacaaaaagctcatcagagtttacaaactcagagcccctagcttcatcagggtcctcccatacgtccccattccaagtggcagggtcccattcttttccaatcagtgtcctcactttaacagtagacacctggtgaggctgtgcatacatctttcattgcaggtcagtcactaacataataagagtttgtgtgtgtttttccacaatttcatctacaggagatgagactctcacacagggcaatcttagcagatttgaggctcagtaactgcttctgaagccaaaagatagaatgcctgagttcatcattttctatcatcactttgtccattgaacttaggacaaccagcttcattatgttccttggttctccacatatggtcaaacctccacctcccagtttcaagcaattctctgcctcagcctcctgagtagctgggattacaggcactcatcgacacacccggctaatttttgtattttcagtagagagggggtttcaccatcttgaccaggctggtcttgaactcctgaactcgtgatccacctgcctcagcacccccaaagtgctgggattacaggtgtgagccaccatgctcagctggtgaaaggtatgtatagagtcactaaactccttgcctctcaagagtgataaatcaggagtgtcaaatgcatttattttacataactctctaaacagttcatccctaggactatcagtgttctccacactattagaagtagagtccttagcatttttgggtctaatcatattaagcagccaacccccgaaacaccagaatcaaaaaaagaactccatccttaatattctgttcctctagaaccactcctgttaccaaaatctgtattagtcagggttctccagagggacagaactaatggtgtgcgtatatatacatatatgttaattaagtattaactcacacaatcactagatctcacaacaggccatctgtaggctgagaatcaaggagagccactccaagttccaaaactgaagaacttggagtctgatgttcaagggcaggaagcatccagcacaggagaaagatgtaggctgggagactaggccagtctttcttttcacatttttctgcctgcttatattctggccacgttggcagttgattagattgtgcccatccagattaagggtgagtctgccttttccagccaactgactcagttgttaatctcctttggcaacaccctcacagacacatccaggattaatactttgtatccttcaatccagtcacgttgacacacagtattaaccaccacacctagttaagagagtcaacatctctccatttggctgagtccaggtgaaacagtcatcaccatttttctaagctgaatccagaaatgagtcagcattctacctgtgggcagattcacatatcacagtcacaattccaactgtgaattttttttttttttttttttttgagatggagtctcgctgtgtcacccaggctgaagtgcagtggcacgatctgggctcactgcaactcctgcctcagcctcccgagtagctaggactacaggcacccgccaccatgcccggctaatttttttttgtattttaactagagacagggtttcaccgtgtgttagccaggatggtctcaatctcctgacctcatgatccgcccacctcggcctcccaaagtgctgggattacaggtgtaagccactgtgcctgccccaaactgtgaatttttttggtgtgtgagatttagaacctcaccagtgggctctgtttatatgtgaaggtgacaatactaagtgttagctttgtctgcgtattaaagtcacaatctcacttgcatactgggccctgggataaaactttggactgccagagggctttatgtaatttccataagtgtcataatcttctgtgactctcataggtaggagctcaggcaggagagtcacaacatttgggtgctgggctcagagttatgccacaatcccttttttgggcatgtctcctgcaacagagaagaggcacattatgtagaaaattggttcagggatttgtcacaatgtcccctttggatggtgcacaggcaggtgaggagagtcacatcacccagataatggaactagcaatatatcacaatgccctctgatggaaggacaaagacaagaaagtcacataacctaggtgagaaaacctgacataggtcacaattcatgttatgagtagggatcatggaaaagaggagagtcacataacctaggggatgcacccagatatatgtcataatcactgcagtgggcagggcctaggcatgagaatcacatcacataaatgctgggcctggccatatgtcacaatccccacggtatacaggtcccagaataaagtagagtcacatcatctacatgttgggaccaaagatatgtatcaatgacacctgtgggcaggggccaggcagaagagccacagcacctgtgtgctggaccctgtgataagttactatttatctgttggcatggcctggtcagaagaggcaaatcaaaccacctgggtgctgggcccagtgatatgtctcaatgtcttccataggcaaagcccaggtaacagaggagactcacatcaaatagttgatgggcccagagatatttcacaatgctccctgtgagcagggtccaggcaggagactcacatcacctttgtgctgggccactattttttgtgtgagcagaacataggaaaaagagaagcgttggctgggcacagtggctcacgcctgtaatcccagcactctgggaggctgaggagggtggatcacctgagatcaggagttcaagaccagcctgaccaacaaggtgaagccccatctctactaaaaatacaaaatacaccaagtgtggtggcaggcttctgtagtcccagctactcaggagactgagacagaagaattacttgagcccaggagcggagttttcagtgaaacaagatcatgctactgcactccagcctaggtgactgagtgagactccatctcaaaaaaagagagaaaagcatcacatcacctgagtgctgagcccagatatgtcccaatccctctgtgagcagaatccatgcagaagaagagagtcaacatacatggatgatgggcacagagatatttcataatgtcccctgtaggaaaggcacaggaagaagtgtaacatcacttgagtgttggacagtgcaatatgtcaaaatagccaatgtggtcagggcacaggcagaaatcacataacctgggtgcagggcctgacagtgcatcacaatgtcctctatgggcagagccaaggcaggagaataggtcacatcagctaagtgcttggccaagtgatacgtcataatccctactgggggctggaccgaggctgggaagtcaaagcgctcagattctgggcagaagcatacatcagaatcacaccagcaggatgatcctgaaatgaaattaacaatcccacacatgtcccagtttcaggtatgagagtcaacaccttttgtaggtttggtttaagtacctgcatcacaatttcaacaatgggctggatttgtacacaaaagacccaatccctcctgaagactgtgtccccttaatgaagccacagcctcacagctgtggggaatcttggtctgagagtaaccaacccacctatggatcagagccacatataagagttaattcttcaacttcccactgcctctgagtgggagattcagagcctcaactgtggtctgtgttcatgtggaaggatgaccatctttactattggctacctgtgcataagagtgtcacaatattacctgtgtgctgggccctgtgaggacggtctctctatcaatcaagggctttttatgttatgcatgagagtcagaatttgctctgagacctccatgctggtatgaacccatgattgtactcatggccctaaacccatgtatgagagtcaacatctctttaattgacctgctccggagaggagattcctcaattgcccatgagatggttttagaaatgagtcaccatctcatttgtggtcaggtgtttacatatgacagtcacaattccaactgtaagctgcatccatgtatgaagttcaagaactctccagtacactgtgtccttgtgtgaatgcaataatcctaataattggtggggtgtgcacacaagataaacagtctcgtctgtgtgctgggcctgtgatgacactctctgtatcacctgagggctttatacagtatgtgagggagtggaaataatctatgaccttcctacaaaaaggagactcaggatcttacccatttctctaagcttagctacaagagacagtatctctcctggtgactggtatgagagttattattgcacctgtcagccaggccaagatgtatgtaacaatcccatttgtcagtagagagtgagcaggatggtcacatcacatgagtgctgggaaagggtaaaatcacaatcatttttgaggccagggaccagggataaaagaaacatcaccttagtgctaggccaagggctatgttccactgttttctgtgggcaaggtgcaggcaaaacaaattcatcacctgttgctgggcccagcgatgtgtcacaattttccctgtgggcaaagtggaggctaaaaacaagggtcatatttcttgggtcatgatgcagagatacatcacaaggcctcctgtggacaggccacaggtagaaatcgccaatttcctaggtgttggagcccacgatatgtcaaaatacacaatgtatgcaaggcccaagcaggagaaaagattcacataacttagatgctgagcctagcaatacatcccaatttcttcttggacagatcccaagagatagaagagtcttatcacacaggttttgggtctagctatgtgtcaaaatattccctgaagggagagatcagaaaggagtgtaacctcacctaggtgagaagcccagagatgtttctgattctgtgtaaggctcaggaataaggtaagagtcaggtaacctagaaactaggctagattatatgttgcaattacccaagttgggggggggctctcatgagaagggagttacattatgtagctgctgagctaaacaatgcatcacagttcccactgtgtactggtcccagaaaggagagtcccatcatctaggtgatgggcccagaaatctggcatatgcatcctgcgggcaagtaacaggcagaagtatctcagcatgtctgtggtaagcccagtattaagttactctcccttctatgggcatgatccaggcagaagaagtcacatcacctaggtgctgggcccagagacatatcacaatctcttttgtgggaaaagacaaggtaaaagaagagactcacatcaaatagttgatgggtctagagatatgttacaatctttctgtgggcagggtctaggcaggagactcagtcactgtggtcctgggcatagcactgtgtaaaaatgctttattttggaagagccaaggcagaagaatatcacctgtctgttagcctagtgacatgtcacaacatcccctgaaaaccaaaccttgaaagaaaagtagaataatgtcagctaggtgctggtcccaattatttgtcaaaatccttcttttgagcagaaattggtagaagaggattatcaaaacacaaagttgactggtgcatagatatgttacagaaaaccttgtaggcaggaccaggccagagagttacatcacccaggtatcagactcagcaacatgtcaaaattgcccatatgggcagggcacaggcaggggttttcacctgtgtgctgggctctgttggaacactttctgcaccgcctgagggctttgtagagtgtgcataaaagtcacagtctgctctgagacctttctgagcatagttggcaaggtccagattacagagtccccactctctagttgacagggtctagatcagagagtcttcacctacctatgtactgcatttattaatgagtcaccaccttaattgtggccaaatgttaatatatgacagtcacaattccaactttgaactgtgtccacctgtgagattcaggagctcactagctggcttttgccatgtgtaagggtgacagtcctaacagttggcagtttctgcattttagaaacaatctcacctgtgcgctaagccctctgaagacattctttgtgccacccaaatggtttatgaaacacaccaaagattggtaattctttctttcttctcttttttttttttttttttgagagggagcctcatctcactctgtcacccaagctggagtgcaatggcatggtctcagctcactgcaacctctgcctcccgggttcaagtgattctcccacctcagcctcttgagtagctgggattacaggcacatgtcaccacacccggctaatttttgtatttttagtagagacagagtttcactatgttggccaggctgctctccaactcctgacctcgtgattcacccaccttggcctcccaaagtgctgggattacaggcatgagccacactgcccagtcagattgataactctttatgacattcatacaaagaggaggcccaggatcttacttgtttccctaggctacaatacaagagacactatctccctattggctgattccaggtacgggaatcatcatagcacctatgagttgggccaggatatttgtcacaatcccaactataagtagaaaatgagcagaagagtcacatcacctgggtgctgtatgaggaatgtcacatttccaggaagcagggcacaggcagaagggtcacataacctggtggccgagcccagtgatattttacaatgctccctgtgggaaaagacctgccagaaaagacacatcacctggttactgggcccagcgatatgtcacaatcttctctatgtgcaggatgcaggcagaaaaagagtcacatcactttggtgatagatgcagacatatgtcacaaggccgcctatgggcagggcttattaagtagcctctgatccagtcctgtaggtgttcggtccagctacatgtcacaataccaaaaatatgcatggctcagcaaaagaaaagatttacatcacctaagtgctggatccagtgatatgtcacaatcctcttctttggcatggccgaggaagaagtagagagtcacatcacctaggcgttggaccaagccatatgtcacaatacacaataaatgcagggctcatgaaaagagagtcagatctcttaggtgtggaacagtggtacatcacaatttctcgtttgtcagagccacatcacctaggtgcttggtccagtaatatgtcaaaattcccttgagaggtgagcccaggaaggaaagtcacatcatttcggtgagaagcccacagatgtgtcactattttccctgtgaatagggctcaggaagaaaaggatagtcacatcatttaaatgatgggcccagagatggattacaatggctcctgggtacaaaaacaaggcagaagaattacatcacctgtgtgctgggtccagtgatgagtcactttcccttgtgtgggcatggcttcagcaggagacaagagtcacatcactaaggttctggttccagagatatgtcataatctctcctattgacaaagcatgggtaggagaggagagtcaaatgaagcagttgatgggcccagagatatgtcacaatgcccccccccccacccccaataggcagagtacaagcaggtgcctcccaattctttaggtgttatggtcagggacatgtcacaatacttaaaaaatgcaagacccaggcaataaaacagagtcacatcacctaggtgctaggttcggtgatatatcacaatccctaattcaagagggctcagggaaataaaaagagtcacataaccaaagtgataaaggtaaagatatgtcataatactcctgtgggcagagtccattcaggagagtcacattaccttgatgttggacccagccatatatcacaatacacagcatatccagggctcaagcagggaagaaaaatcacatcgtctagttgctgggtttgatgatatgtcacaatcacttgtttttgcagaacccagacagaaaagaagagtcacatctcctagttcatggatgcagagataagccaaaaggttccttgtgggcaggacccaggcaggaggctctcgtgccctaggtgtttgtctcagccatacgtcacagtacctaatatatgcagggcccaggcaaacaaggagaatcataacaccttggtactaagtttagtgatatgttacaatccccacttttggcagggccaggatgcacacacatgcgaacaaaggcacatcacataggtgattaaaaaaagaaaaaaacatatgtcataatacccctgtaggcagggcccatgcagaagagtctcatcaactaggttttagacccagttatttgtcacaatacacaatttatgcaagactcagacacaagaggaaagtcatgtaacctaggtgctgggtccagtgatacattagaatctctccttgggtagagtccaagcagtagaaaagagttacattacctgggtacttgctccaggaatatgtcacaatacctcctgaggaaagagtccaggaaggggagtcacatcacctaattgaggggcccaaagatatatttcccagtgctccttgcaggtagagctggggataatcaaaagagtcacataacccaggggctgagcccagctatatgtcacaactaccctaggtgcaagtctctggtatgagagaagagtcacattacataggtactgggccaagtaatatgtcacaatctccactgtaggaaggtctcaggaaaagagaagagtcacattatctgggtgatgggcacaggaacgtatcacaattaccctagacagaagcgttacatcacctgtgtgtgaggtccagtgataagccactcttccttttgtgcacagggtccaaacaaaagatgaaagtcacatcacctaggtgctgggcttccagaattgtctcaatccctcctatggtcaaagccaatttaagagacaagaattatattagctgctctgcctatggagcagctttttttgtttgtttgtttctttacttctctaataaacttgctttcattttactgcatgggatcaccctgacttcttggggtctggattaaaagcccttttcagtaacagctttctggcaaattataaagggactatactgaggagaaaactgaaccaaaggaaataaactgcagcaccaattagccaactttgggtaactagtggggtatattctaccagggtaaaaaatgggattgggttagaggcccaatatagaagcagtacagtctctcctaagacatattgggttaaagacctctcttaataaaaagcttgaggacccagttatgaaggttcaagtcctttctaagatttaaggggttggccaggcacggcggctcatgtcagtaatcccagcactctgggaggctgaggcaggtggattacctgacgtcagaagttcgagaccagcctgaccaacatggagaaaacccatctctactaaaaatacaaaaactagctgggcgtgttgacatatgcctgcaatcctagctactcaggaggctgaggtgggagaatcacttgaacacgggaggcagaggtagcggtaagccaagatcgtaccattgcactccagcctgggcaacaagagggaaactctggctcaaaaaaaaaaaaatttagggggttagaggcccctctcagtaatgtcactcttggttaaaaaatcgacgaggcaggccaggcacggtggctcatgcctgtaatcccagctactcaggaggctgaggcaggagaatgtcttgaacctgggaggcagaggttgcagtgagccaagatcgtgccactgcactttttagattaattttccctgtgctctttgctgacagttgtgcgtgacacgattaggcatgtacaggatcataagacatggggagcttctattctcctcaaaaggggaaactttaggtatatctcctaatgctatccctcccccctccccctaccccacaacaggccccaatgtgtgatgttccccttcctgtgtccaagtgttctcattgctcaattcccacctatgagtgagaacatgcggtgcttggttttttgtccttgtgatagtttgctgagaatggtggtttccagcttcatccatgtccctacaaaggaaacgaactcatcatttttttatggctgcatagtattccatggtgtatatgtgccacattttcttaatccagtctatcattgttggacatttgggttggttccaagtctttactattgtgagtagtgctgcaataaacatatgtgtgcatgtgtctttatagcagcatgatttatattcctttgggtatatacccagtaatgggatggctgggtcaaatggtatttctagttctagatccccgaagaatcaccacagtcttctataatggttgaactagtttacagtcccaccaacagtgtaaaagtgttcctatttctccacattctctccagcacctgttgtttcctgactttttaatgatcacatgtaacaaacctgcacgttgtgcacatgtaccctagaacttaaagtattttatatatattaaaagaaagggggaaacttgagagctaatgaaattgctggaaaagatcccttcatgactgagaagtcaccgcctgaatttctcagtgccgctgcaatgggtgggtctttcactggcgtccctgagctcctccctttccccaacctgcctcaggcaatgcttttctttccttctctcctctttctttcttatcttttctgttatttagtgcaactgtcctttgtggttttttgtttgtttgtttgtttgttttgagatggagtttcactgttgttgtcagggctggagtgccatggcgcattcttggctcaccacaaactctgcctcctgagttcaagtgattctcctgcctcagcctcctgagtagctgggattacaggaacttgccaccatgcctggctaatttttgtatttttagtagagacagggtttcaccatgttggtcaggctggtctcgaactcctgacctcaagtgatctgcccaccttggcctcccaaagtgctgggattacaggcgtgagccaccacacccggccatgtgtgatagttatatatgaaagagttctgattaattggcttaaaaataataaatgcttaagtctaattttttttcagaaaaggaacaaacgtaatgccttttatctcatgtgacataagtaatctttgggaactaaaagcagttttacatgcaaggtgtgtaagaaaagtagaatgtgcttttggtaaatgatcataagatggcataaaaatgttaatttttttggcctagtttagagggctaaagagttgttttaagttaggattgagctgaaggtttgagcaagttttggaaggtttgtaaaaattaagcttgtaaaaaaaattctgtgtgtgaacatattggctaaagttaaagagatattattcagttttttttgttttttcttttttgtttttgagacagagtttcgttcctgttgcccaagctggagtgcagtggcgcaatctcagctcaccgcaacctctgcctcccaggttcaagtaattctcctgcctcagcctccctagtagctgggattacaggcatgtgccaccatgcccagctaattttgtatttttagtagagacggggtttctccatgttagtcaggctggtctcaaactcctgacctcaggtgatccatcagccttggcctcccaaagtgttgggattacaggcgtgagccaccatgcctggcctgtattcagtttttttaaataaattaaacattggaatataagtacaacgggtttttttttttttaaagcacagatctgttccttaacaaaaattgcagagttattaaacgtttatgaaaatcttgccttatggtcaaactgattaagattggatagacttgtatataagattttattaaaaacttgttttggccaggtgcagtggctcacacctgtaatcccagcacttcaggagccaaggagggaggatcacttgaggtcaggagtttgggaccagcctgactaacatggtgaaacccgtctctactaaaaatacaaaaattatccaagtgtggtggcacatgcttgtaaccccaaatactagggaggctgaggcaggagaattgcttgagcccaggaggcggaggtttcagtgagccaagatcatgccactgcactccaccctgggtgacaagagtgaaactccatctcaaaaaaaaaaaaagaaaaaactgggtttgaaatcaatagtacactaattcatacgtgaaatgtaggcttctcttttaaacaagatttttatattatattttgaaaaatgaaaaatttttgtctgccttttgaataaactacaagaaaaaaaagacaggagacaaatagtttggaaagctaagtctttatcaaaaaggaaaggtttttgcctttttaataatctttaagaaggcaagttatttttattattatttttgagataaagtctcactctgttgcccaggctggattgcagtggcgtgattacctcactccaacctccacctcccgggttcaggtgattctcatgcctcagcctcctgagtacccgagattataggaacacattaccctgcccacctgttttttgtttgtttgtttgtttgttttttggtcattgtttgtttgtttttgagatggagatggcttccaactatgtctacacagtccctgtgcagggttcctgacccatggtaagtaaggaatgtcatttcttttttttttttttaagacagagtttccttctatcacccagcctggggtacaatggtgtgatttcaactaactgcaacctctgcttcccaggttcaagtgatcctcctgcctcagctgcctgagtaactgagactacaggtgcatgccacgacacccagctaatattagtatttcatgtcaagatgggttttcaccatgttgagcaggctggtctcaaacttctgacctcaggtgatccactcaccttggtctcccatagtgctgggattacaagtgtgagccactatgcctggccaggaatgtctctttctgacagaatcaggagcctgaagttgtcttgggaccccaagaagagagaaattcacccaactcacaggtatctgatggtacaaacccatggctgggcttggcttttaaaaagtcttttctgatattcctttaatggaacatagttatatcaaagccaattttaaaaacctatgtgaaaaataattatttttgctgcactttatacaaataatcaggccaactataagactaaagctttttatgcaagtaaatcagttttaccatgatttgtctttagtagaaatggaagactggagagagaaaaaaatcatgtttcaagaactatggtacacctgttgttacacactagtctcatttgttgtttttgagtattttccctgctatttagactaattctgcttattcctttgaacacaccagtgatctctgactgcagctcaaaagaaacaagagagatgggtaatataaaaatccagatcaggcaccaggcacggtggctcatgcctgtaatcccagcactttgggaggccgaggtgggcagatcacgatgtcaggggttcgagaccagcctggcccacatggtgaaaccctgtctctgctaaaaatacaaaaattagccgggcgtggtggcacgtgcctgtaatcccagctactgaggaagctaaggcaggagaatcacttgaacctgggagccagagttgcagtgagccaagattgcaccactgcactccagcctggccgacagagcaagactccatctcaaaaaaaaaaaaaaaaaatccggatcactaatctaattctgaacacatattggaatcaggtagcaaacccatatcagcttcttcccaacatttgcccttatttagtttacttgggataattttacttattttactttacttgggataattttacttattttactttactgttgtggattatattgttgttgtgctctttgtgtagaaatgcaagataagcttgctcaatgttttcttaagtagaacacttaattttgcagatatcaacatttgttaagaactcaagacttataaatgatccttgtaatattgatgctttctcacctggctgggcatggtggttcacgcctgtaatcttaacactttgggaggccaaagcaggtggattgcctgagatcaagagttcaagaccagcttggccaacatggtaaaaccctgtctctactaaaaatagaaaaatcagctgggcatggtggtgggtacctgtaatcccagcttctcatgaggctgaggcaagagaatcgcttgaacccaggaggcggaagctgcagtgagctgagatcgtgccactgcattccagcctgggcaacagagtgagactctgtctgaaaaaaaaaaagaaaagaaagtaggaaagaaagaaagaaaagaaaaaaaaaaaagaagagtcaaatcacctaggcgctgggcccagagatactctataacccctcactgggcacagccaaagcaggagaaaaatttacataacctagatgctgggtacagcagtatgtcccaataccccttgaaagaagggtgagccagagagtaatatcacccatgtgagggaccaaaaggtatgttacaatgccttctgtaggcagaggacagggtggaggattacatcaccttcatgttggactcagcaatatgtcacaatggcccatgtgggcaaaacacaggcacgagagtcacataacctaagtgcgaggagccacaatatgtcaaagttgtctctatgggcagaaccaagacattgactaagcgctggtgcagaaagatgtcactacccagtctgtgggctgagcccaggcaggagcataaaattgctcaagtgctaggctgaggtatatgtcacagtcacagctacatgaaggtccagagatgagattaaccatcctgatcatgtcttggttctaggtatgagaggcaccacctcctgtatgttgggtataggtgtataacccacaatctcaacagtttgctgaatccatccataagagcctcaatccctcctacagactgtgtccctttagtggagtcaaagcctcacagatatgctggatcttggtcttagtgtcaccaacccacctgtgaaccgaatccatgtatgaaccagttttccatcttcaactttctttggatgtgagattcagaacctcaacagtcagctgtgttcatgtggaagaatgacaatatttactgccagctgggtacatatatgagtgtcataatcgcacctctataccatgctctgttaggacaccctttgtatcacctgagggatatgtatatatgataatgggtgtgtgtgtgtgtgtgtgtatatatatatatatatatatatgataatgtgtatatatatatatgataatgtatatatatatgataatgtgtatatatatatgataatgtgtgtatatatatgataatttgcatatatatatgataatgtgtatatatatgtatatatacacattaaagtcacagtatgctctgagactttgtgcatctacagactcatgatcctacctgtggccccaaacccaggactaagagtcaacatctctccattgaatgcatccaggtagaaaggatctaacttgccagaattagaaatgagtcaccatgtcaactgtagctggatgttcacatatgacggtcacaatccaaactgtgggctgtgtcaatgtgtgaaattcaggacctctccaatggggtctgtccatctgtgagggcgacagtcttaacagttggtggtatgtgcatataagaaacacagtctcacctgtttagtgtgccctgtaatgacactttctgtaccactcaagggctttatataatatgtaaaaaatagtagtcttttatgaccttaatacatagagaagacccataatctctctcattttcctaagtctggttatgggagacagtatctcttctattggctggtttgaggtataagagcatttaataaacctgtgagctggacaaaatatatgtcacaattctacctgtgggtaggaagtgagcagcagattcacatcacataggtttttggcaaagatatgtcacaatctttcctgaggtcagaaaccaggcagaagtcatatcacctaggtgttcagccacagatatattacaatcccctcttaaagcagagtacaggcagcagagtcatttcacctgggtgctgagcccagtgatatgtcaaaatgctctctgtgggcacagccttggcaggagagacacatcatctggtgactgggtccagcaatacattacaacattttctgtgggcaggatgcaggcaaaagaagagagtcacatctcttaggtgatggaggaagagacatcttacaaggcccctcatgggcagggcacaggcaggagcctcccaccctgaaggaatgatgcccagctatatgtaacaatacccaagatatgctgggcccagggaaaacagaagagtagcatcacttaagtgctgggtttagtgatgtgtcaaaatcccccattttgtcagggcccaagcagaagagaagagtcacatcacctaggtgatgaatgaacagatatgttataatacctctgtaggcagggcccaaacagatttgcatcacaaaagtgtttggtccaggcaggagaggaaagtcacgtcacctaggtgttaagcccagtgacatatcacaatctgttcttgggcagagaccaagaagtagaggaaagtcacttcccctgggttctagggccagcaaaatgtcacaatgccctctgtggaaagtgctaaggcaaaagtgtagtctcacaccacctagatgctgggttcagtgatatgccacaatttcacctgtaggacctaggcagaagggtcaaatcactcagttgctgggaagagctgtatgatacaatcacacatgcaagatggtgtaagaatgagattaacgatcccatacatgatctggttcaaggtacgagagtcaatacctactgtatgttgtgtctaattacacgagtcaccatctcaaaggtgaactggatctgtgtattaaatcctcaatccctcccatgaactgtgttccctcagtggagtcagaggctcacaggtgtgctgaatcttggtctgagagtcaccaacccatctgtggacaagatccatgtatgtgattcaatttttcaactttcaactgcctttgggtgtgaggttcagaacctcaaaattggctgggttcatgtgggaaaatgacaatctttactattgtcagggtgcgcacaggagtgtcataatctcacctgtgtgcttggccctttaggacactctctgtactaccctagggctttacatggtttgcatgagagccacaatccagcttgagattttcatgctggtataaacctatgattgtatctgtgtctctaagcccagttatgagagtcaacatctctccaattttctgggttcagataggagagccctcactttcctatgagctgcatttaaaaatgttttgctatcactgggtgcagtggctcacacttgtaatgccagcactttgggaggctgaggtgggtgaatcacaaagtcaggagatcgagaccatcctggctaacacggtgaaaccctgtctctactaaaaatacaaaaaattagccaggcgtggtggcgggtgcctgttgtctcagctactcaagaggctgaggcaggagaagggcatatacctgggaggcagagcttgcagtgagccgagatagtgccactgcactcctgcactcctgcactccagcctgggtgacagagcaagactccatctcaaaaaaaaaaaaaaaaatagttttgctatcccaaatctggatggacggtcacatatgacagtcacaattccaactgtggactgcatccatgtgtgggattcacaattgcagtctgtccacctgtgagggtcacaattttaacaggtgcttggttgtccatacatgcaagtcaatctcatctgtgtgctgggctctgtgatgacacactgtgtacaatccaaaggctttataccataggtgagagtgtggtaatcccctctgaccttcataaaaataggagaccctgaatcttaccaattttcctaagcctagctatgagaagcagcatatcaactgtcgtctggtttaagatatgagagtcatcatctcacctgtgagatgggacatgtaacctgtgagtaggtagtgagtaggagagtcacatcacctgagtgcttggccagagatttgtacaatattccccgctagaagggaccaggcaggagaggactatcacctgggtgcttggccagagatttgtacaatattccctgatagaaggtaccaggcaggagaggaacatcacctgggtgctgagcccagtgatatgtcacaatgctccctttgggcaaggttcaggcaaaagaaacacatcatctggtcagtaggcccagcaatatgttacagtcttctctataggcagggtgcaggtagaagaggacagtcatatctcactggtaatggatgcagagatatgtcacaaggccttctgtgagcaggacgcatgcatgtgcctcctatcccctatgtgttgagtccagtgatatgatacaatacccaaatatgcagggcccaggcaaaataggagtgtcacctcacctaggttctgggtccagtgattcattacaatccccttttattggcagggcccaggcagaagagaagaggcacatcacctaggggatgaatgaaaaaatatatcttaatacccctgtaaatagaacccacgcataagagtcacatcaactaggtggtggacccagccatatgtcacaatacacaatgtaggcagggcccaaacataaaaggagagtcacatcttctaggtgctaggactagtgatacatcacaatccctccttgggcagagtctaagcaggcaaggggagtcacatcacctaaatgctgagtccagcaatgtgtcacaataactcctgagggaagagtccaagcagtattgttatatcacctgggtgctgggacaggaatatgttgcaatcttccttgaaagcaaagactaggcaggagaatcacatcacctagtttctgggaccagcaatattgtcacagtgcttcccagtggactaggcccaggctggagaaacacatgacctggttgccagacccagtcacaatcttccctgagggtagagaacaggcaggaaaaaggcacaacccctacaagatagatgctgagaaatacaataagccccctctagtcagggtcaaggtaaaagtctcttatctcctaggtgttggacccagcaatatgtccaataccaaaaatacgcaaggcccaggtaaaagaggtgagtcacatcactaagatgctgggtccagtgataagtcactattattctttctggcagggaccaggcagaaaatgtgattcacatcacctaggtgactaacgacatgataggtaataatgtccctgggggcagagcccatacaggagaatcaaatgactcagacattgcacccagacacatgtcacaatagcaatgtatgtacagcccaggcaggagaggagagtcacataacctaggtgctgggcccagtgataaatcacagtttcttattgggcagagcacaagtggtagagaagagtcatatcacctagttgcttggtctgacaatatgtaacaataccccctgaggagcaggctcaggcaggagagtcacatcacctaggtgatgagctcagagatatgtcacaatgccctcaggtgcgtagggcttaggaagaaaagaaaaattacataaactaggtccagggctcacccatatgtaatgatcaccccagtgggggagcacccaggcatgacaagagagtcacatcatgtaggagctggctcaagcaatatgtagcaatctccattgtggacaggactgaaaaaaagactggccacatcagccatcaaccatgtgatgaaatcagaaatatgtcaaaattattcctgtgagcaaagaccaggcagaagaattacatcatgtgtgctgggcttagtaataagtcactctcttctctgtgggcatggtccaggcaaaagaaaaaagtcacattacctaggtgctgggcccagagttatgtcacaacctcttctatggagaaagcccaggtaaaagagaagagtcacatcaaatagttgatgggctcagagatatgtcacagtgccccttgttaacagggtccaggcagaagacttacatcttcttcgtgctgggttcagcagtatttcacaatgttgtttgagagcaggaccaaggaaagagagtaacataaccttggtgttgggcccagtgatatgtcacaatgtcccctgtgggcaaaacctagaaaaaagagaggaatcacattatctaggtgctggacctggcagtctgtttcaataccctctgtaagcaggaactaggcaggaaaggagagtcacatcacctatgtaatggtcacagcgatacgtcagaatgctctctgtaggcaaggcctaggcaggagatttacatcacctgggtgttacactcaggaatatgtcacaatggcccatgtaaggcacaggcaggagagtcacataacctggatgttgggtgcagtgatatgtcacagtgttccctatgggcaatgccaagtcaggagaatagattcccatcacctaggtcctgagttcagcgatgtgtcacaatcctatctgtgacctgagcccaggcaggagagtcaaatcactcaagtgctggacaaaggcatatgtcacaatcacagctgcagggtggtccataaatgagattatcaattctgcacatgttcaggagttacaatctcaactggggactttatctctgcatgagagcttctatttgtcctgcacgctgggtgtccttagtggagtcaaagtctcttaggtttcaggtatcctgaatcttggtctgagagtcaccaactcatcctattgctgggtcaatgttgcagcagacctgtacccatacggattcactgccagtaacaggtaacaggtaggagagaacagtaacatctcctaggtgcttgatccaaacatgtcacaatagcctctttggggagggctcagatgaaagagtcccattatctaggtgaagtgtttagagatatgtcacaatgctccctgtgggcaggactcaggaagaagagaagagtcacataacctagaagctgtgcccagctgtatgtcacaaccagcccagtgggaagagccaaggcatcagatgagagtcacatcacataggtgctgggtcaagtgatatgtcacaatctccttttgtggacaggacccaggaagaaaaaaagtctcacatcatctaggaggagagcccaaaaatatgtaacgatgattctcgtgggcaagaatcaaggcagtagagtgaagtcacctgtgtgctggacccatgggtaaatgattcttccttttgtagacatggcccaggcacaattacatcaactaggtgctgtgcccacagaaatattacattctctcctatgggcaaagagctggcataacaagataatcgcttcaaatagttttgagctttcagagatatgtcacgatgatctctgtggtcagggaccacgcagaagactcacatcatgttggtggtgggcccaacaatatgtcacaatgttttctgagaagaaggtcaaggtaaaagagtaatgtcactttggtattgggcccagcaatatgtcactatctcccatgtgagcagagaccaggtaagagaagagaatcatatcaccttagttatgagcacagacatatgtcacaaagccccaagtaggtagtgccaaggcaggagaatactgtcacattacctaggtgctggatcctgtgatatgccgcaatccaatttgtcagctaagacctcacaaaaaagtcaagtcactcaggtgctgggagatgcaggaagattcgggggtaagattaataattccacacatggcagggtgtccacagttctggccccagaccccaggtcccggccagattccccaaagtcagaggctggaatctggtggtggatgtagggtgtcagctgagcccaacccctgcccagcggtggccagcatctaataattagtaactccacacagcggctcacacctgtaatcccagcaatttgggaggctgaggtagacggatcacctgaggtcaggagtttgagaccagcctggccaacatggcaaaaccctgtctctactaaaaacacaaaaattagccgggcattgtggcacatgcctgtaatcccagctgctcaggaggctgagaaagaagaaacgcttgaacctaggaggtggaggttgcagtgagccgagatcatgccactgcactccaacgtgggtgacagagcaacagtccatctcaaaaaaagaaagaaaataatgataataataattccacacatgtcccagttctaggtatgagggtcaacacctcctgaatgttgagtctaagtacatgagtcacaatctcaacagtagactgcatcaaagcctctattcttcctgcaaactttgtcttcttagtaaagtcacagccttacaggtttgctgagtcatggtgtgagagtcaacaaccagcctgtaaaccagatccatgtgtgcaagtcaattttccatcttttgaccacctttgggtgtaggattcggaacctcaacagtgggctctgtgaagtcaccagctgaagggctattcatgcacgaaaagttgttattttatcatcattgtttctattgcttttaccttgctaagaatacatgtgtagcttataattgtgctagaaaaccataagggttttggttaaattacccgttgttgtatgttatgaaatagacaaaaaattggcaaaaatagattaaaattatacaaacttggtgtcaactttctcttgggcaagtttaggaaagacagacctggaaataccccagtaaaaggctaatcagaatctcagaaaaattgcaaccattagtcctttatctacctatgacctggcagctcccgccctgcttcgagttctcccactttcctggacaatgtacaccttccatatatcgattaatgtctcctgactcctaaaatgtataaaatcaagctgtgacccaaccaccttaggcccgcgttgtcacgacctcgtgaggcggtgtcacgggtgtgtctttaatcttggcaaaataaactttctaaattgagacctgtctcagatactttggggttcactttactaattttaggtagaatttaaaattcttaaaatagaaacaaacataaggactaaactgagaaaaactttaaaaagtatactcaaattcactgacacaatcatgggtatatctaaataatgagattccgttttaagtaagaagaaaatacgtaattacgaaggaggctttacctttgggaaaacaaaaagccacttttgaccaattattcccacagatacacacccgggtccccaaccacccgccaggagggcccatcctggtgcctggaaggcgggggttcctgcgatctggggttgggatttcggctcaggccgtgcgcggtggccttgggtcgcgcccgccctgcctgggcccccagcccaagggaccgagcgggtgcgggcggggcgggcggggcgggcggggcgggggtgtcgggggctcggactcggagccgtccctgccagtggctttcgtgggcggccccgccttggagcccaggccaacgagccgcgcgggacggaagagctgcgggtggggagggacaagcgggcggagaaggggcggccctgctggaggcccagcgagtctgagtgattgacaagtgaatgagctgggaatgaagactcctggggccgggagggagagagggggttggagggtggtgaatgcctgggcctctggggctccaggctgccagtggcccgaccaggctctcggtgtcctcctccaacctcagtttcctcacctgtcccagaggacgaatatgactgttgtgatgattaggccagataatcctggtaagcatttattagcctgcctggtctctggatattttttttttcttggtaaagacattttgccgcccaatatctactattggagagagagtttgggaggcagaaggtaggactcacccttggcttcagagtcccttatgggtgccccatccccttaggttcaattaaagcacatagttggaaacaagtcccctacccaggacagctacagagtccagaaccagaagatcttgttttctgaaccaaggactttgtcttatccccaaatcctaattcctcagggtggtcagcttcagacaggagtctgaaattgattctcgctctccggggtggatccaaggctcttgtgatgcggtgttgttctaccccatcccacccctgtgcctcccccaatgcattgggagtccttaaccgtagtgacttcaatttggaaacaatgctcccaaagcaggagatgtggccctccccaggcagctggcctgataaacatctgtcctggggcaaaagacccagagcagggagggactctcacttcccactttcacatgctatagtcatttaatgggctgtggtgacatctctgggtcacctagcctgcagaatgggatgttgactttgtgccacaatgagggaaacggaggcacagggctagtgagtgaaaaaaatcagaaagactctgtgactaggaaacactattcaggcccacggcccctacaggactcagcatcctttggggtgcaccagtgggtggtatgcggcaccctggttgccatctgtaccttatgggggtgagggtgacggtgagtgtcctggcaggacaaggtgctctaggacccacgaggtagatagacattgcccgcctttccctggctgtgggcacagcaagagttctgttctctaatgtatgtgaggaccagtgcctacatgcaatagacacttctcatttcagacattccaaagattttaggggctgcatagaaagaaactgagacagactctaaccacatcctcacactgacaggagcctccagtctaggctcagctctgactcttcctggggaggtttgctccaccctcgtccttccaactagaacccactcccggtaggcctgtgcacgcccatcttttacagcagcagcatgtcttggtaacttgacattttctgcaataatcttgctgtttgttgtttacttctttagtgtttgttcctggcagctgtgtctagttcaccactgtgttcccagtgccaagcacagtgctcggcccgtgggaggtgctcaatgagcagttgtttaatcaatgaacaatggctctgtctatgccagggaagcaggagtaggtcagagcacaccttagctcacccatttcctgtctgggtgaccttggataagtcctgaacttttttcctttcagtcaccttgtctgtgacatggagattaattaaacttacctgagttatttctgatgagaatttaatgcgcaaaagtatctaaaatgcttctaaacacaggctggcacagtgagagtgcggcacacatgtgagctgtttgcattatcatgccgcaggttgttggaattctttttcactcatcatttggatcttgaaactctgtttacctcattgcatataaggaaaatacattttgaattatgtttagtatttcacactgaaattatttaaaatgtctatagctaggtaagatgtggttgctcatgccaccatcaaaccacagcactccagcctaagtgatagagtgagatcctgtctcaaaaaatacatgtaaatagttggctgggcgtggtggctcacacctgtaatcccagcactttgggaggccgaggtgggcaggatcacaaggtcaggagatcgagaccatcctggctaacacagtgaaaccccgtctctactaaaaataaaaataaaaaatagctgggcatggtggcggacacctgtagtcccagctactccggaggctgaggtaggagaatggtgtgaacccgggaggcggagcttgcagtgagttgaaatagcaccactgcactccggcctgggcaactgagcgagactccatctcaaaaaaaaaaatacatataattaattgatatttatatatgattcctgtgtgctgcataactcttgtagcacagagttgtttattttttagataatgtacattacacagagttgtttattttttagataatgtacattatttgcctttttcagtgatatttttgtattttatattcagttgaaatagcatttctattagttgtacaaataaatatattatttcctattttcagctaataaccatagctgcatagttttaaaatattttattaacttatctggaagagttgataagataaacttattttatattttgtgtatgaacatataaatatattttatgtttttgtgtgtgaatatataaaaatattttatattttgtatttgaacatataaatatctggacactgtaataaactgataatacatttcaaatgcttttgttaatcactctatttttaatcactctattttagattcatcctttttatacattctatgaatggatggatggagaatacgtagacagatagtatataaatgtatgtgtagataaatgtagatgcaaatacacatctgttgagacaatgctgctttcaaaatcacagagaatggtcacattttaaccttttatggaattaaataaaacaaaagattttctatttttaattacatttacattttaataatacaatacataaataacatatttttaataaaattctggattccatttaatattatattattagaacttctgtatctattctgacacttgagattaactttaactttccttttgctgagtttgcccagtttttatttgaagtaatactacatcatgggatcaccttagaggctttctatatttatatgttttgcatcagtttctaaaatctggaaattatctcattttgaatttcttatggaaatagaatcttccccactaaaaatatcccattagtatactgcactttattattattatattttttttttccaagacagagtctagctctgttacccaggctggagtgcaatggtgcgatctcggctcactgcaacctccgcctcctgggttcaagcaattctcctgcctcagcctccgaaatagctgggtttacaagcgcctgccaccacgcccagctaatttttgtatttttagtagagatggggcttcactgtgttggccaggctggtctcgagctcctgcccttgtaatctgccctcctcggcctcccaaagtgctgggattacaggcgtgagccactgtgcctggctactgcactaaatgtttctctttctggttatattatctatataatatttagttatttttatttattttaatttgctttcaattttcgtatttgcttttgaaattacttttttaactggcataatattcccttggattctattaatgaacgtccgtgctgttttatattttgatattaaaaataaaacctcagtgtggatgtgatggctcatgcctgtaattccagcattttgggaggctgaggtgggaggattacttaagtccaggagtttgagaccagactgggctacataatgtggctgcctgttgtctaagtcatctgaactcccttggggaggggcagcagccatcactgcagctgctagctaccaatgacactaagcccctggggtgcaggggagggtggcagtcatcactgtagctccaggccatgctattcccctgttggagccaaggaggttagaccgcttggtcccaagaggcattccccacagcacagcacaccagctgttgcagacaatggcctgactctctctttaggccagaccttcatccatcccttctcactgagtggggcctccctgcagaaactccaacaactccagctgggagctcagggacaaaaccttgatcttcctgggcctgaccccctagggggagaggttgccatagtctccatggaccagcagacttagtctttcctcttgctagctctgcaaaattcaggcagcccagatgagtcagtttccctccaccacagcacaccccctccaccaagggacagccaaaatgcttccttaaatggttcctggttcccatgccctcaactgtgtgagacccccaataggggtctccagacactttatacagaagcattcctcctgacattaggtcactgtcccttggagtcagaaatcccagaggaaggaggaggcacccatctttgctgttctccagctttctctgtgggcatctccaggtgcaggagtgacccagataaataggcctgaagtgaacccccagcaaaccactgtagccttacagaagaggaacatgcctattgaaagaaaaacaaataaaaggctacagcaacaatgtcaacaaaaaaagttcctacaatggccgggcatggtggctcacaactgtaatcccagcactttgggaggctgaggcaggtggatcatgaggtcaggagtttcagaccagcctggccaagatagtgaaaccccgtctctactaaaaatacaaaaattagccaggtgccatgctgggcacctgtaatcccagctactcgggaggctgaggcagtagaattgcttgaagccaggaggtggaggttgcagtgagctgagatcatgccactgcacaccagcgggggtgacagagcaagactccatcttgaaaaaaaaaaaagtccccacaaaaacttcagctaagagtcagcagcctcaaagatcaaaactggacaaactcatgaagataagaaagaatcaacacaacattgctgaacacacaaaagaccagagtgcttcctctctaaatgatcacaacacctctccagcaagggcacagatctgaacagagaaaagactgatgaattgacagaagtaggcttcagaaagtgggtaataacaaacttcaaggaggtaaagatgcatgtcctcactcaatgcaaagaagataagaaccatgataaaagattacatgagttgctaactggaataaccagtttagagagaaacataaatgatctgatggagctgaaaacacagcacaagaactttgtaaagtatacacaggtatcagtagccaaagctatcaagcagaagaaagaatatcagagcttgaagactatcttgctgaaataaggcaggcagacaagatgagagaaaaaagaataaaaaggaatgaacaaaacctttgagaactatgggactatgtaaaaagaccaaacctatgactgattggagttcccaaaagagatggggagaatgaaaccaagctggaaaacacacttcaggagatcatccaggagaaattccccaacctagaaagacagaccaacattcaaatttagaaaatacagagaacctcagtatgatacttcatgagaagatcaaccccaagacatataatcatcagattctccagggtcgaaatgaaggaagaaatgctaaggccagccagagagaaaagtcaggtcatctacaaagggaagtctatcagactaaaagcagatctctcagcagaaactctacaagcagaagagagtggggggccaatatttaacattctggaataaactaattttcaacccagaatttatatccaggcaaactaagcttcataagcaaaggagtaataaaatccttttcagacaagtaaatgctgaaagaattcatcaccacaaggcctgccttgctagaactcctgaaagaagcattaaatatggaaaaaaacaaacaaacaaacaaacacccataacagccactgcaaagacacactgaaatacaaagatcaatgacactgtgaacaatctgcatcaactagtgtgcaaaataaccagctagcatcatgatgatgggatcaacttcacacataacaatattagcgttaaacataaatgggttaaatggaccaattaaaagatatagactggccaattggatgaagattaaagatttattggtgtgctgtattcaagagactcgtttcacatgcaaagacacacatatgcccaaaataaaaaaaaaaaaaaaaaaaggaaaatttactaagcaaatgggaagcagaaaaaagcaggggtggcaattctagtttcctacaaaacaggctttaaaccaacaaagatcaaaaaaagcaaagaagggcattacataaggtagcaagacaaactgcagacaaaacccctcagacaccgagttaaagaaggaagggctttattcggccgggagcttcagcaagactcatgtctccaaaaaccgagctcccccagtgagcaattcctgtctcttttaagggcttacaactctaagggggtccatatgagagggtcatgatcaattgagcaagcagggggtacgtgactggggactgcatgcactggtaatcagaatggaacagaacaggacagggattttcacaatgcttttccatacaatgtctggaatctatacataacataaccaattaggttaggggtcaatctttaaccaggcccagggtgagacaccaggctgtctgcctgtggatttcatttctgcctttagtttttacttcttctttctttggaggcagaaattgggcaaaagacaatatgtggggttgctgccagagcccttagacatggaggccagcctttggaaaccccatctagttgttttgagagataggccactggccttggccagggccccacagcctgggttgaaactccaactgccattatttctctttctgacacatagagtgtaaagggttttgtcaagtcaggtatccccagggctggggccaacatcagtttttcttttaactcatgaaaagctcattgctgttggttataatagaagtagtttatccaatctacatttttattaagtgtcgtccaccaaaatattgtctcaaatcctgcagctatttgatttcaagctttaaattgatctggtattccccatgggactccaattacatctaaatagatgtgagagtcgaaagacccataaggggcttctctcactttatggtgtcttatttttcctccctcttgttgatgaaatgccagggtgaaagggatagccaattggactaaagtacaaattccactccagttatttggcagagtgcccagtaaaggtccatcacaataccaccacacatccatgccaggatgaacaaagggctgactgattgataagctcttgaaaattcttaagctcagtacatcccttcaggtttccaaggaatgctaagtttcctccctatcatgagagatgcaaagtgaacttagtgttgggagatggaagctggatggcccttgggggcagatccacagggtgccagacttagggatatagcagagagagcttggcatgacttattactccaggctatagaatgctggaaaacagctaccatacagcccatgcctgggcaactggaggaccaccttagtggaaaggggacaatcagggcctctggcctgccatgtgctcaagcataacaattgtctttgtttaatgtgtggatggaatatttgatccattccaaccaggcatttgcatcttggtatcctgtcttaattgccaaagtttgttttaagtctttaacttctatgatcctctagtaaaatgaatgtatgattttaggaaattacaaaaactggttggggcagtccatccttgctctttagtggtccacagaaagttggaccagctatggcataaaagctctacattgggggccaagaatcctggttgacattggagtctttatcaaaatttccccagattaaatggtcctaatttactaatgcccagtctgaggagagtcaggagggacagaggtacttttctgaagtagagagctgtctttgacttggcaattccccacagggtataacaacgcaagcattaaaggcaatggcttgaggcgaaattgacttggttatgttaataaccctagaaggtcagcaatagagcaaggaaaaaagaaagagtaatagaatagatgaaagagttaaatttttctcagctttagtttggtagagttttccgctgggactatggcccatgactctggagggggtggtgctttcttgactcgggtgtgatgagtccatcattttttcactgtacaaacagcagtcttggtggttaacagcacaaagtagggtccttcctaggctggctcgagtttcctttcttttcaccctttgataagaacgtgatcttcaggctggtgctggtttgccggaaattcttggagtggtacatgtgctaaaagacttttagttttgagggaagggaaagtggaagataaaccaagtatatgattcttaagaaactgaccttttttttaaattgacctttttgttttaaaagtccgtcagcagaggactttacagtccttggtgccttttactgagaaatttcctttagcatctattttcattagtttttagaccaaagaagccaaacaccatcttatagttgacaatgcttcctgtatgatttttataccagataagctaaatgtcacctttatattagtgtgttattaatgttaaacttagttttattaaaactttgtagacatgtttattcaatttttaatgtcagaccataaggtaagatttttatagactctttttaaccttttataatctttcttgaagagcaggttagtgctttaagaaaaatctgttgtgtttttactttaatgtccagttcacagaaaaactggatgatacccctttaactttagctaatatgttaacacacagaattttctttataattaacattttaaaacttgcttaaaccttcaaaacaaattttttttaacctttcaatgtaggtaaaaatttacattcttatgcctccttataatcattttaccaaaggtatattttagtttccttatacaccttgcacataaactgtttcttcaatagtactcaggaggcctaattacttttaaaatatacaacatttcttgcataatttcttttttataactttttttctctttcacgacttttgcagataattcttcgacatgcctcaactttctgacttattacaaacatttctttctttaaacaaccagttaatttgtttcaggacaataatttaccatataacattctttttacataaattctgccccccctttttttcccttttttttttttttaagatgacaaccattcttttcaaaaagcaaacttgctttatgtctgtggaccagactgtctaaggccacaagattaaaagttactataatacatgttacactattaacttttagcaaactttacttttgttgaaaaccttgtaaatttgagattccaactatcctttgctattaataggaccttgtttagtccaaattaacttaaaattggtatagatggctttttttttttttttcatttacccagtaggaaacatctatcatcctgtcctgaagggagttcctcctaggtctggttggacctttgtatggtaattaagatttagatcccctgttaggaaacctgctgggttaagtgaattttcagcggttaatgttaagtctttttttttttttttttttaactcaggatacttctgaactggtgaggtgtgctcacaatgaggtttcctctaaattatttttctactttcttctgtgagcaaagcagttgccactacagattgaatgcatttgggccatctttgggttactgggttaaggatttttgataggaaggctacaggttgtcaggggcctcagtgctttcggactacgcccttgtttacacttacaaggtggtattggagtgttgtagggtcatggagaagaccttcaattatcaattatatttgactttctgtctctctctctctttggctttccttttgcctttgtctcttcctctctctctgcctctctctttctctctctctcttcttgactccctctttgtctctctgtctcttcctctctgtcttttcctctctctctttgcttctttttctctctgtctctttcctctctctctctctgctggtctttccttgcctctgcaagctgcttatgctgctgttctctcaaccactgtggggtggggggggggtctaaaaccagctgtaaccaagtgtctatatacaggaactggtctgggtgtcctggcttacaggttaccttgtgccatacctttgtaacacgggacctgtccaggcttccttctgatagtcaacccacctctaatgccagtctatcttacacaaagttttaagttttcctgctgtcatagtactccatagtctcccttagatcctttcttgaaatttttcaacatagttcctggtggggtgggcttactttgtgcctgacccatgctttcttgagacaagacaccatgctcacaccacatgcataccacaaaacaaagaacgggttaaaagggcacacacatacttttacagtttacaccaaaccagaatcaaaaccaaaatcagagtatcaagaaatccaagccaggtcaaaaccaaaaccaaagtatcgagcaatccaaatcaagtcaaaaacaaaaaccaaagtgctggtacaggcacattgtgggtgatcaggccacacttccactcaaatggagtaggcaagttacaaagaccagtcttaccaagtttcagatgtctggactccaagtgccatttccttcccagtgttcagccactgcattgatcctccgtgggggcctgccttgcaccactctgacaaggcattccaccgaggcaaatgcctacccaggagcactctcaggatccacgtcactcaagctggccggagttccccatagggatgctccacagggcaggcctaagccacctaaggggctgcctcaacggtccatccattaatcacctcgcttcccagtcagggaaccaagaaatgtagcaggacaagccacagacaaaacccctcagacaccaagttaaagaaggaagggctttattcagctgggagcttcagcaagactcacgtctccaaaaaccaagctccccgagtgagcagttcctgtccttttaagggcttacaactgtaaggggttcagtgtgagagggtcatgatcaactgagcaagcagggggtatgtgactgggggctgaatgcaccattaatcagaatggaacagaacaagacagggattttcacaatgcttttccatacaatgtctggaatctatagataacataaccagttaggtcaggcgtcatactttaaccaggcccagggcacggcgctgggctgtctgcctgtagatttcatttctgccttttagtttttacttcttctttctttggaggcagaaattgggtataagacaatattaggggtggtctcttcccttaataattataaaggaatcaattcaacaagaagagctacctatcctaaatatataggcattcaatacaggtgcacacagattcatgaaacaagttcttggagacctacaaagagacttagacttccatacaataatacagggagacattaccaccccactatcaatattagatcaatgagaaagaaaattaataagaatattcaggacttaaacacagctctggatcaagtggacctgatagatatttacagaactctccaccccaaaacaacagaatatacattgttctcagtgccacatggaacttactctaaaattgattgtataattggaagtaaaacactcttcagaaaatgtaaaaggactcaaattatatgatactgtctctcagaccacagtgcaatcaaattaaaactcaagattaagaaactcactcaaaactacacaactacatgcgaattggacaacctgcttctgaatgacttctgggtaaataatgaaattaaggcagaaatcacgaagttctttaaagtcaatgagaacaaaaaaacaatgtaccagaatctctgggatgcagctacagcagtgttaagagggaaatttatagcactaaatgcttacattagaaagctagaaagatctcaaatcaacaccctaacattacaactaaaagaactagagaggcaaaagcaaataaatttaaaagctagcagaggataagaaatgactaagatcagagcaaaactgaggaagatagggagatagagacacaaaaaaccttcaaaagatcaatgaattcaggagctggatttttgttttgttttgttttgttttgctttgttttgttttgttttttgagacggagtctcacacttgttgcccgggctgcagtgcagtggcaagatcttggctcactgcaaccttggcctcctgggttcaaatgattctcctgcctcagcctcctgagtagctgggattacaggtatgcaccaccaagcttggctaatttttatatttttaggagagacggggtttcactctgttgggcaggctggtctcgaactcctgacttcagttgatctgcctctcaaaatgctgggattacaggcatgagccaccatggctggcccaggagctggctcttttgaagaaattaataaaatacatagaccactagctagactaataaagaataaaagagagaagaatcaaacccaataaaaaatgataaataggatatcaccagtgaccccacaaaagtataaactactaacagagaatactataaacacctctatgcaaataaactaaaaaatctagaagaaatggatcaatttctggacacataaaccctcccaagactaaaccaggaagaagtcaaatccttgaaaagaccaactaagttctgaaatttaggcagtaataaatagcctaccaaccaaaaaaacacacacaaaaagcccagaaccagatggactaatggttgaattctaccagaggtaaaaaaaggagctggtgaagcagcattgttgtctggggtaaatacccagggttcatcatctaatgctgagaaggttaatgacacagacacacacacttggagtgtgtttaaagagcagaaagtttaatagatgaaagaaagaagaaagagagggagagagagagctttctcatgcagagaaagtggggcacccaaggtttccaggatgcaattgacttttaaaagaggcttgaagagggggtgattgatttacatagggttcaaaagattggtttgaccgggtgtaccatttacataacctgcaaaaaaacttgccttcccaccccaatcttttattatgcaaatgtggcctctacctggctggatccatgacaactgcacacgaggggacaaagaaaaggaagggggaattgccatattgggtggacctggctttcagtacagctgcccacgttcatctatgcagggttctagcttgcttatctatgcttgtagcttgacttttcaggctgctttatgttagaaaagagatggtttttggctgatttctattaaagaaaaatttcactgagaacatttttacacttgctaagtgactaaaataatttcctaataactgctatattactggtaccatttcttctggaactattccaaagaattaaaaaggagagactctcctcccttctcgttttatgaggccagcatcaccctgatgccaaaacctggcagagacacaacaaaaaaagaaaacttcaggccaatatctctgaagaacattgatgtgaatatcctcaataaaatactggcaaaccaaatccagcagcacatcaaaaagcttatccactacaaactagtcggcctcatcactgggatgcaaaactcatttaacatacacaaatcaataaatgtaagctatcacataaacagaaccaatgacaaaaaccacatgattatctcaatagatgcagtaaaagtcttcagtaagggctgggcatgatggctcacgtctgtaatcctagcaatttgggaagccgaaatgggtggatcatgaggtcaggagttcgagaccagcctgaccaatatggtgaaaccccatctctactgagaatacaaacattagccaggggtggtggtgtgcacctgtaatcctggttacttgggaggctgaggcaggagaatcacttgaacccaggaggtggaggttgtggtgagctgagattgtgccactgcactttagcctgggtgacagagcaagactccctctcaaaaaaataaaataataatactaataataaagtcttcaataaaatttaacattccttggctgggcgcggtggctcacacctgtaatcccgtaatcccagcactttgggaggctggggcaggtggatcacgaggtcaggagtttgagaccagtctgatcaacatggtgaaaccccatctctactaaaaatacaaaaattagccaggcatggcggtgggggcctgtaatcccagctactctggaggctactctgaggctgatgcaagagaatcccttgaacccaaaaagcagaggttgcagtgggttgagaccatgccactgcattccagcctgggtaacagagtgagactctgtctcaaacaaacaaacaaaattcaacatcccttcatgttaacaactctcaataaactaagtattgaaaaatcatacctcaaaataataagagctatttatgacaaacccgcagccaatatcatactgaatgggcaaaacctggaagaattctggaaaatcagcactagacaaaatgccctctctcaccactcctattcaacgtagtattttaagttctgaccagaaaaatcaggtcaaagaaagaaataaagggtattcaaataggaagagaggaagtcacattgtctctgcagatgacatgatgctatatctagaaaatcccattgtctcagcccaaaagctccttaagctaataagcaacttcagcaaagtctctagatacaaaatcaatgtggaaaaatcacaagtaccaacaataaacaagcagattgtgaaatcatgcatgaactcccattcacaattgctacaaagaaaataaaatacctaggaatacagctaacaagggatgtgaaggacctcttcaaaaaggactacaaactactgctcaaagaaataagagaggacaaaaacaaatggaaaaaatttcatcctcatggataggaagaagcaatattatgaaaatggctgtacttcccaaagtaatttatacattcagtgctattcccatcaaactaccactgatgttcttcacagaactaggaaaaactactttaatattcatgtggaaccaaaaaagagcctgtatagccaagaaaattctaagtgaaaagaacaacgctagaggcatcatgctacttgacttcaaactatacaacaaggctatagtaaccaaagcagcatggtactggtaaaaagaaaaacagacacattgaccagtgaaacaaaatagagacctcagaaataagaccacacgtctacaaccatgtggtatttgacaaacctgatagaaacaagcaatggggaaaatattccctatttaataaatgatgctggaaaaaaataaagtcagaaaaactaaccttctctctttctggtcatattatctatatcttatttagtcatttttatttatttcaattgctttcaattttagtatttgctttggaaattacttttttaatatgtataacattttcttggagtctatttatggacatcaatgctatttttcatattttgatatacaaaataaaacatcaatgtggatgtgatggcacctgcctgtaattccagcattttgggaggctaaggtgggaggattactttagctcaggagttcgagaccagcctggtctacatagtgtgacctcacctctaaaaataacagtaataaattagctgagcatggtagcacatgagtggggtcccagatactcagaaggctgagatgagaaaactgcttgagcccagatggttgaggctgcagtgagctgcagtcatgccactgcattcctgcctggctgagagagaatctttcttaaaagaaagaaagaaaaagaaggccaaggtaggtggattacttgaggttaggagtttgagaccagcctggccaacatgacaaaaccctgtttctgctaaaaatacaaaaattagctgggcatggtggcatttgcctgtaacaccaggttctcggtaggctgaggcatgagaatcgcttgaactcgaaaggcagatgttgcagcgagtggagattgtgccataggactccagcctgggcagcagagcaacaccttgtctcagaaaaaaagaaaagaaagaaagaaagaaaaagaaaaccacagagaataaactataatttttttttaatgtttgtaaagctctaattgcatagcagatttctggaagtcagtttccagaatccaaggctaatccctaagcattttatacatttctttctgcattgattataaaattcaggtttcccaacagaaatggaaaaaaataaagcatgaataacaatgagatagcacacaattatgataatggcaatcatgaaaagaaaaatttcaaagaccgtcaatgaaaatttggattaaatagatctagaaatatgaaatggtagagtagctttggaaaatagtttagtggcttattataaagttgagtatacacttattatgttaccaagacatcccactgctaggtcattactaaagtaaactgaaaactaatgctgaaatgaaactttttatggatgtctattgctcactttatttgtaattgcaaaaagctagatgtaaactagatgcttttcaacaggtgaatgaataaacaaaccagtgcatacctacaatagaatcctagttgtcaataaaaaaaaaaactattgatcgacatcacagtatagatgagtcacaaatgcatttctttaattgaagaaagtaaaatccagtttacagattatataatccaagtatatggcattgtagaaaaataaaattataaggattgataataatcagtccaggcttgatggctcaagtgtataatctcagcactttgggaggctgaggtgagaggactgtttgagcccaggattttgagaacagactgggcaacatagaaagaccttcctacaaaagaagaagaataaaaagagaataatcactgattgccaaagaatagatgagggtagacttaactacaaataggaggcatcggataattttgggggcaatgaaacagttctgtgtggtactgtgaagatggctatgtgactctagacagttttcaaaacctatggaactgtacatcacaaagaataaattttcctctctgaaaattagaaaaaacaaggattgggggaaaattcagataaaatgcagggagtaaaaagaagagttcacccttactagaaatgtatcacctaaccctattgaagaaggttggaatgaaaggacttggtgtaaatcactttgaataacactattttgattaaatactgcaagactcaagaactgaacacaaacattgtgttctggtatgtattgcttgtctataagcatatagactagcaatttttaaaagcactctatatgttagtatgtatatatatatatatatatatacataaataaatataattagtgcctgcatctctctgaagttgaaaaaaaagagaattctagaatggagttgagaatattttgataaatgcatgtatcataacatatctattgagagagacagaaagagagagatgtgttcatacaggagtcaatattaatatgtacctttccaaactctgtttgctgagaggttgcagaagcagtgacaccccaatattaatgggcacacctagctctcatatcatggtttctaagtactattcttcaacaaaaaaagcaagactacttgtaataatagacaattctagcactggagtggaaaatccaagttaaggtagagtattgttaagctaaaaagtttaaagtgctttatgaacaacagaagcagccatgtcagagaaagtcaacctgaaagacttcccaggagcccaagctggaaaaatgtgaaaaacacaataaacattattagcattggattaacacccagagaattaaaaaaaaatccatgaatccataaagatagagaaaaatacaaataagaaaaaaagaaggccagtcgccgtggttcatgcctgtaatctcagcactttgggaggctaaggagggtggatcacctgaggttgggagttcaagaccagcctgaccaacttgaataaaccccgtctctaccaaaaatgcaaaattagccgggcgtggtggtgtatgcctgtaatcccacctacttgggagtctgaggcaggagaatcatttgaacctgggaggtggaggttgcagtgagctgagatcacgacattaaactccagcctggacaacaagaatgaaattccatctcaaaaagagaaagagagaaagagaaagagaaagaaagaaagaaagaaagaaagaaagaaagaaagaaagaaagaaagaaagcagtagaaaaaagaaaaaaattttctttagaaaattccaagtatactaatcaatgtagaagataatgcaaaatagaaaatcaccactaagacaccacagtaataattactgtagacaagatgtacttaaaaatgcaaacattgtggataaaatttaaaggagaaacagtgtttctgttagccccaaagtatctgcctcaaatatttataaatagccccaaagtaatagccccaaagtatctacctccaaatatttataaatactatttcctctcaatttctttataagacttatgactaaggaaaaattataacacagtattgtgagatatatgtgtagatgtaaaatatatgaatagcacaaacaatagaaggaagtaattgtaactcttcaacagcaaggttttcatattttacatttattaaaatagtacagtataaactctaggtagattgtgatatgttacaaatgcatatagttatccctggagaaaccactaagaaatgtaaggaggtgtcacttaaatgctattaaaggaatttaattatataccaaaaagtatttgtacaagaatgtttatagagcttttagtcataatagcttaaagcagggaacagcctaaatatccatcgctagaaatatagatgaacaaattatatctcattcatacaagagaataccacccagccatagaaaaaaatgaactactaaatcacacaacctggatatatctcataaacctgccagataagacaagcttgaaataaaataatacgtattgtatgatgtcaagcaaaatgaaccaatgattaaaaagaaaaacacctctggtagagaataaaatcatctggaaaaaagcatgaggaaattatctgataattttttaaaaatccattattctgtggagtcactcatgctaaatgtgatataaactaaaaatgtaaggaaataggtgatcctaaagcagttcgggttttgttttcttctgtaaacagcagattttaacacaaggagttcctttctactgtaattctttttaaaaataataacctgaagtccttgtttttactttacaaaacccacagttctgctatttcacagtgggatttgagactaaataagtatacttttgatggtaactgatgctatcaatgtctaaagtttgggtctgtctctcaaaattgggaagatgaccaaaaaggagaaattattaaatcaattatagcctaaagctgccttcttttctgtttaatttttgtcaataggttctctgtacatagcaaactgaaacctaacttgatatgtaaatagactgtaacccactcttgtaccaactactgtgtttttggcaataaaaggacatcagctgtttaaaccatgttcgagtaaggcaaatctcgagctgtaatcaatctggctgtttctgtatctcacccccattttctgtatgtcactttgctttttctgtccataaatctttttccaccatgtggctatgctgcagtctctctgagcctactctggctccacaggctgcccaatttgcaaatcattctttgcccatttaaactctttaaatttaatttttctacagtattttcattttaaaagttttccattttattctatgatgaaaaataaataatctgttgttggcatttgattttctaaacttatccatcacctacaaatataaagtattctttgtctttttaaaatccttctgcaatttctttctttctttttctttctttttttctgagacaaggtcttactctatcacccaggctggagtgcagtggtgtatccaaacatggctcactgcagcttgaccttccaggctgaagtgatccttctgcttctgcatctgccacctgagtagctggggttacaggcatgcaccaccatgtctggctaatttttaaatttttattcatgaagacagattcttactatgttggctgaacttgaactcgagctcacgttattctcccatgtcagcctcccaaaatgctaggattacaggtgtgagccactgtgcacttctgcaaattcttgacaggattattcccaatgataaacagtactatattggcacaaatgtaaaaggaatgtaggctggctgcagtggctcacgctagtaatcccagaaccctgggaggccgaggcaggcagattacttgaggtcaggagtttgagatcagcctggccaacatggtgaaacctgtctttactaaaaatacaaaaatgagtcaggtgtgatggcaagcacctgaaatcccagctacttgaaaggctgtggcaggagaattaattgaacatgggaggaggatgttacactgagccaaaattacactactgcactccggcctgggtgacagagtgagaccccatctcaaaagaagttaaatagattaataaaactaaaataaaaggaatctggcctctatcgtagaagtgtcactctccaggatttcaagggtctagggcagctactttagtagtgtcatctatggaggtggatgggctttggagtctgacagagttgatcctgagtctcagcccagccacttagtagctgtgtgtctttggacaagattcttgatgtgaaagagttctataaaccacatatgcaaaataaaaaaaaaaaaagcagaatgacactgatttcaaaaatggtagcaatttctagttttttctgtatccatgcccattgccaggtgcttttaaagctgttcccatcaagatccaggatgttttccaaaccctagattttgctggccttattcactcagggcagtagaaacctgtgaacatgacaatgtaacagtttgaggcctaggctcatgtggggaaaagcaagagagatcagattgtcactgtgtctgtgtagaaagaaatagacatgggagactccattttgttatgtactaagaaaaattcttctgccttgagagtctgtgaccttacccccaaccccgtgctctctgaaacatgtgctgtgtcaaactcagggttaaatggattaagggcggtgcaagatgtgctttgttaaacagatgcttggagtcatcaccactccctaatctcaagtacccagggacacaaacactgcggaaggccgcagggacctctgcctaggaaagccaggtattgtccaaggtttctccccatgtgatagtctgaaatatggcctcgtgggaagggaaagacctgaccatcccccagcccgacacccgtaaagggtctgtgctgaggaggattagtacaagaggaaggcacgcctcttgcagttgagacaagaggaaggcatctgtctcctgcccgtccctgggcaatggaatgtctcggtataaaacccgattgtacattccatctactgagatagggaaaaaccaccttagggctggaggtgggacatgcgggcagcaatactgctttgtaaagcattgagatgtttatgtgtatgcatatctaaaagcacagcacttaatcctttaccttgtctatgatgcaaagacctttgttcacgtgtttgtctgctgaccctctccccacaattgtcttgtgaccctgacacatccccctctcggagaaacacccacgaatgatcaataaatactaagggaactcagaggctggcgggatcctccatatgctgaacactggttccccgggtccccttatttctttctctatactttgtctctgtgtctttttctttcctaagtctctcattccaccttacgagaaacacccacaggtgtggaggggcaacccaccccttcagctcaaaaggtcttgaatgcttctgtttttctttcagaatgctaccatttccatgaaaaatggccgatgttagcaagctggaggataagataccatggggaggagaagcaaggtgcccctgttgacagccccagaagcagaagctcatccccagaagcacagctgcctattcaacaaacagctgaagatacatgtctggaggagctcagctgagacaaaaagaacagcctcactgagcccagcctaaatagctgaccatctcaattatgggcaaataagttttgaatgatttgttatgctgcaatagctaattaatacatgcacccagtgcagacaggatgccaggattcattgacaagttgattactagttctcttctaacagtgggcaccctataggtactgatttttccccctgatttgaagttggatgccaagtaagagaatgctgagtaatgcagaaatatatatggatatgtatgcatgtaattggtgcctatactcacacagtcccccataccacaggagaaaacagataaccacggcctgacattagggccaaggacaaatagaaaagtaagtttgcctttaatctgttttcttcatatctaaacattggaggtcaagactgtgcacaggtttgaagacatagagatttcttctcctgtggccttatcatcctttgttcaccttctgatctctggaagaaaggtggaaaatgggtggccagcagtggtctacctgtggttgtttttttcttgctgtcctctgatttttctatggctactatctgttcctccctcagagctgaagagaaatgttggtagggaaaggctcttttttcagctttggcagaaaagttttttcaggcccttcgctcccgaggtcagagctgcacttcaatgtggcagctactggccatgtgtggcgactgagtgcctggaatgtggctggtctaaactgtgatatgctggaaaggtaaaatacagagttagtttcaaagatgaagttccaaaaaatatctacacttcatttataatttacattttgcttacatattaaaatgataatattttggatatactggtttaattaaattgctacaataaataccgcattttttgtttgtttttctttttaaagtttggctactagaaaatttaaaattcacatgtagctcacattttatttcagaggattgccttctttttaaaatctcaggcaatctgatggaaaaaacagaagtcagggaggtcataaaatcagaaatttttagataatttttattatattcttttcatttgtgtataaccatataatacattatttacgaaagaatatgaccttatacaaaaggttaaatgcaaataccctctggggttggcctggcttacttagctcagggaagaagccctgcctgaaaaggctgcagcctagactgtcactctttacttttttttgggggggggggcgggggacagactgtctctctgtcaaccaggctggagtgcagtggtgcgatctcggctcactgcaacctctgcctcccgagttcaagtgattctcgtgcctcagcctccggagtagctgggattacaggcgcccgccaccacgcctggctaatttttatttttagtagagacgaggttttgccatgttgtccaggctggtctccaactcctgacctctggtgatccacccgcttgggcttccctcccaaagtgctgggattgcaggcgcgagccaccgcgcggcctatcagtcttcattctgtccagcatctgatcacatcttttgtcactcaggatctgaggaggcggggatttaagaattatccaatcagggactctgggctaggaaccgtccaatcaggcatgcagctggagcggaaaaggcggcatccgagatgtggcggggccgttgtttctggttgcagccgcagttcccggtctcgccttcactgctgtgtgtcctcagcctctgtggccctgtaacctgcggcattggaagatccacagctaacatgccaggtgcccctggcagcctagaaatggtgagagtgccgggtccgacatcccgagaaggggaaggggctgattggaaccggtgggaagtggctgtggcgggactccggcctccccgcagtcagctccacaatctgcgcctggagttctttcccatctcggcctcagtctccttcagccataagatggcgaatgcgctgactgcgggaccctgggcgacctgtctcctccatgcgctgtgactgtgccctggcctggagccctctctgggccgctctgcacccgcatggccgcgtctctccgagattgtgcagggaccacgggaggggcgtcaggggagaatcctgactccggatgcgggttcatgaatgggaagagctttggtccagtgaggtttccagtccctcttttcttctgttaaaaatttatggcggtcaccactaaagtaataaataatttaatcaaagtgattcaaaaattgtagagcacccagctatggtttgtagtttatggtctatggaagggatttgacggaaagatttttttaaggtgcacaatgaagaaaaccaaattcagtaattggttatgtacagttacgtagtttctcagtttgtacaatcaagatggaaatttcccgtttatataatcagaggttaattgtagtttatagttggttaagcctgagttttgtttcccccaatgtataatttacaaaaaaaaaaatgcacttgaattagatttttttttttctttttttgagacggagttttgctcttgttgcccaggctggagtgcaatagcgcgatctcctctcggtgcaacctccgcctcccgggttcaagcgattctcctacctcagcttcctgagtagctgggattacaggcatgtgccaccacgccgggctaattttgtatttttagtagagacgggggtttctccattttggtcaggctggtctcgaactcccgacctcaggtgatccgtcctcctcggcctcctaaagtgctgggtttacaggtgtgagccgctgcgctcggccgaattagattttttaaaaagtagatatcagggactagagccacctcagtctaattgcctgccacttaattattcttaattattttcacactcctcggaggactgatttttttttttttcccttgcattttttacaggtatcccaaggagagtattatgtgtactcccaaacccccattcctgcagcctatctctggcttgcagtaaaatataaaatttccagttcattgttaccttcccaaatgtcaattttttcctctctgattcacattactatttgtcctttttttttttttttgagatggagtctcgctctgttgcccaacctggagtgtggtgtcctgatcttggctcaccacaacctccgccttccgggttcaagcaattctcctgcctcaacctcctgagtagctgggactacaggcatgtgccaccatgcctggctactttttgtatttttagtagagacagagtttcactatgttggccaggctggtctcgaactcctgaccttgtgatctgctcgcctcagcttcccaaagtgctgggattacaggcgtgagtcaccgtgcccagcctactatttgtcctttagtgtacatttttgataccatgttttaattattttttaacaaagcattggatggcacttttcctaatatttgttttctgtttgtaaatatttcctatgagaagaaagcaaaaaattatcccctgacactgcgttgtaaaaagtctttgtactgtttttttttttttttttcctcctaggcccacagattttatcagaatgtttcgggggtaaatgttttcctttggaaactttatggagtgatgtgttttcagccattcttcagatttttttcctggtcctgggtttcagtactgtctgggaattaactaaaataccccccatggctatgtctgctagagtgtctagtgaatatcagctcctggtcattttctcccatgggacaatctgaggtatggagtgtagcctttcagggaagcaggcggatgccctggaattgagaggaatctcctggcatactcttcctttgaaaagctaacccttgagacattaagattgtcttcacccaacccagcttccaattattgaagacccaacccagcttccatttcttgctggtcagccaatcagttgctggtattgcgggaaaaagcattgaaataatttctgccccctgcattctctaagggggcaaaacaatagggaaagaaatataatgaaaaaatagtgaaagaaaaatagtgcgaatctttgaaatcaaaaataatatcccaaaagaaaaaaaaacagtgatccagtgagatggtgtaagaacttgcaaagtaaaatacatctggggcactcactggggcttaattcagagtctcctgagaaggggttattgggcacttaagtgagcagaatggagtgggagaatctctcaagtgattggatggcctgattgaaacatgagtcagacacatctgtaccttgaaaagatttggtcgcttattttgacctcagttttttaactgtgaattgcattttgttagtagggattgaaagaaagataagaaaatatttaccaagggcaaaaaagagatggatttcagaataaaattaatatttaattatatattccatttgttaatttttttttttttttttgagaccaagtctcactctgtcgcccagactggagtgcagtggcgcaatctctgctcactgcaacctccatctcccaggttcaagtgattcttctgcctcagcctcctgactagctgggactacaggcgcccgccaccacacccggctaattttttgtatttttaatagagatggggtttcaccgtgttagccaggatggtctcgatctcctgaccttatgatccacccgcctcagcctcccaaagtgctggtattacaggtgtgagccactgcgcccggcaaaaatttgtatttacccttttctcagaatgagtttaggaattttctctggtttgttttttatggctgggtgtttttaaacaatttcaaggcttaacttttagaatgctaccagggaaaaaaataggaaaaatctctcttccattttggcttcagaaaatgcacacatttccacaagaaaatatggtaggtaattggtgagttatgtagattcatgaaaacatcagttcctctttttgcagggtaaatttgtaaccgtgaatatctctattctatatcctgttatattgctgtctgagtttcatgctaaattttatgagctgaaactttgtaccctctagaagtgttcccatatgactgtttactacatgatttttaatggaaatagtaaaataatatttattgtctgaaaggaatagatacttttgcttatcttactgagacataaaatgtaagcaccttaaaattttcttcccttacatgtacactgtgttagagtaattctgctgaatttttcaaacacttactttcaaaaaccacatgaataactctgacatgaaaattaaagcctgagcctagtgactctaagctaaggctaatactgagcctgcaaaaggaagttattaaaggaccacttagttttttctggggagtcttctctgcagatattccagcctgctcaccccagccatggaagacgcctttatcctgagagaaactacatagccttggaaagttggggacccacagccagatgcagttaaggttaagatgaaaggggattgggagggtcttactgaagatgaaattgttattgttttgtggtagtttctagactttgtaaagtaaaacaaagttagatttatgttggaaaaagaattgaattccaaaagagtattgcaagaggacgaagtaccaactctgagatcttcaaggattgcaaagtttaggcagacaagggccttgtttcatatggaagagcaaacagtattaggaggtgggaggggatggcaaatggagggtgaaagaatgagattttagatcagagaatgttttaccctgaagtcatcatgttcttaggaactacataaaatggggttgtatgttgactcagactgagggtagcttaaagttcagaaagctgttgaaaggaaataaacttaagtaatgtttgattaagaagtattctaggttgaccactgaaaacaaattcagctgatttatttattttttttaatgagaaaaaagagacagtgtgcagagtctgtgtctggctatgtgacaggtaagaaaagagcaccatctaagtcataatgggaagggtatttctttctgacttttcctggattgtatcttttctaataaactgataaatgtaactaggttgttttcctgagttctgtgagtagctgtataatattattgaacttgaagaaggttatgagagtccccagtttttaaacggtagctcagaaacagatgggtctatggggtttgtgactggcatctgcagtaagaacaatgttgtgagactgagccctgaatcagggtctgtgctgactctgggtggtgtcagaattcaaatgttaggcaatgagttggtgttggagaattgcttggtgtttaccaagctctacaaatttggttccagataaaagatatcacagaggcctggtctggaatggatctctgggtgtctgggaatgggaggctctgcttttctctacacaggccatcacactgcccattatcctgtgatttcagatctcctcccggggtgagagaggataaaaacttagagtaaaaaagttctgataacagaccccctttttccactgctgccaccacaggattcccaccttcttacaaacatatccactagacattgacttgtccacacccctcgtaggaataggtaccacccccagcaatttcactacggcatttttgatcctagcgtttcttgccaaaaactcacaaaagtgtctacaagtctcctggcatatcccaacccccagacactgaatctgcagcagcaacctgttttctccaccaacctggggttctggacaacctgttcataatctcatctgcctgcatggacccagaaattaatcagagtagagtcacacctgggccactatctgtagcacaaaccagtccttccacctgcattgccctctccccaacccataaagttcttttatgttttgtttttgtttttgtttttgagacagtttcattcttgttgcccaggctagagtgcagtggcacgatctcggctcactgcaacctcagccttctggtttcaagcaattctcctgcctcagcctcctgagaagctgggactacaggtggctgccaccacgccccgctaatttttgtatttttagtagagacagagtttcaccgtgttggccaggatggtctcaaactcctgatctcgtgatccgcccacctcagcctctcaaagtgctgggattacaggcgtgagccactgtgcccagccagcgagttttttgttttaacttttatttttgattcaggggtacatgtgcaggtttgttacataggtgaaattgtgtcggggggttggtgtgcagattattttgtcattgaggtattaagcacagcaccacacaggtattatttttctgatcctctttgtcctccatcctccacccttaactagaactcagtgtctgttgttcccctctttgtgtccatgtgttattatttagctcttactaataaatgagaacatgcatttggttttctctttctgcattagttttgtaaggataatggtctccagctccatccatgttgctgcaaatgacataatcttgttcactttttatggcaacacagtattccatgatgtttatgtaccatattttgttttcattaaatcttttattttatttatttttggagactgggtctcactctgtcacccaggctggagtatagtggcatgatctcagcttactgcagcctcaacctcctgggctcaagcaattcttctacctcagcccccaagtagctgggactacaggtgtgtgccaccaagcccagctaatttttcttgtattttttgttgagatggggtttttccatgttgtttaggcctgtcttgaactcctgagctcaggcaattcacctgcctcggcctcccagagtgctggaactacaggcatgagccaccacaccttatcataccatattttctttatttagtttaccattgataggcatttaggttgattccatgtctttgctattgtgaatagtgccgcaatgaacatgtatgtgcaggtgtctttatgacagaataatttatattttattgggtatatacccaattatgaggttgttgggtcaaatggtaattctctttttagttctgtgaggaattgccacactgcttttcacaatggttgaactaatttacactcatgccagcagcacatagccgtttctctgaaaccttgccagcatgttattttttgactttgtaataacagccattttgactggtgtgagatggaatctggttgtggttttttctttgcatttctctagtgatgagtatttttttcatatgcttgttagccacatatatatcttattttgaaaaacatttgttcatgttttttgtctacctttttttttataattgagacgaagtctcactctgtcgcccaggctaaagtgcagtggcataatctcagcaaacggcaatcttcacctcctgggttcaagcgattctcctgcctcagcctcctgagtggatggaattacagggacttgccaccatgccctgctaatttttgtatttttagtagagacaaggtttaaccttgttggccaggctggtctcaaactcctgacctcaagtgctctttcctccttggcctcccaaggtgctgggattacaggcgtgagccaccactcctagccttttgtctatttttttttttttttttgagacagtttcgctcttgtttcccaggctggagtgcaatggtgtgatctcggctcactgcaacctccgcctcctgggttcaagagattctcctgcctcagcctcctgagtagctggaattataggtgtccaccaccacacgtggctaattttttgtatttttagtaaagacagggtttcatcatgttggccaggctgatctcaaactcctgacctcaggtgatccacctgtcttggcctctgagagtgctgggattacaggcataagccacggagcccagccaccttttgtctaccttttaaggaggtcgtttgtttgtttcttgtaaacttaagttttttatggattctggatattagacctttgtcaaaagcatagtttggaaatattttattttattctataggttttgtgtttactctgttgatggtttccattgctgtgaagaagatatttagtttaattaggtcccatttgtcaattgttgctgttgccattacttttggtattttcatcataaaatctttgttagttcccatgtctagaatggtattttctaggttatcttgaagggttttttataattttaagttttacatttaaggctttaattcatcttgagttgatttttgtatatgatgtaaggaaggggtccagtttcaattttctacacagtgctaggtgtttatcccagcaccatttattaaatagggaattcttcccacattcctcttgttagttttgtcaaagatcagttggttataggcgtgtggcattatttctgggctctctattctgttgcattggtctgtgagtctgtttcttgtaccagtattatgcggctttggttacagtagccctattgtatagtttgaagtcaggtaatgtaacgcctccagctttgttctttttgcttaggattgccttggctactcgggctcttttttccttccatatgaattttaacatagttttctatagttctgttaagaatgtttttggtagtttgataagaatagcattaaatcatttctttttttgggcattatggccattttaatcattttgatcttttctacctatgagcatagaatagttttccatttatttgtgttatctcggactttttttttttttttctttttctttttttttttttttttgagtccgagtctcactctgtcacccaggatggagtgcaatggcacagtcttagctcaccacaacctctgcctcctgggttcaagctattctcctgcctcagcctcctgaatagctgggattacaggtgcctaccaccatgcccaggtaatttttgtgtttttagtagagatggagttttactgtgttggccaggctggtttcgatctcctgacctcaaatgacccacccggctcggcttcccaaagtgctgagattacaggcatgagctaccgtgcctggccgtctgtgactctttaagcagtgttttgtgattcttgacatagagatctttcacttctctggttaggtgtactcctagatatttgtgtgtgtgtgtgtgtgtgtgtgtgtgtgtgtgtcagttgtgaaggggattgtgtttttgatttggcttttggcttgcatgttgttaatatacagagattctgccaatttttatacatttattttgtattctgaaattttgctgaagtgatttgtcagtttaaagagcttttctgcagagactgtagggttttctagatacagaattatgtcatctgcaaacagggatagtttgacttcctttcttcctgtttgaatgcctttcattttatctcttgtctgattgctctggccaggacttccaattctcttaaataggagcggtgagagaaggtatgccagttttctttcttttttttttttttttttgagacagagtcgctctgtcgcccaggctggagtgcagtggtgcaatcttctccgctcactgcaagctccgcctcccgtgttcacgccattctcctgcctcagcctcccgagtagctgggactacaggcgactacaggcgcgcaccactacgcccggctgattttttgtatttttactggagacggggtttcaccgtgttagccaggatggtctcgatctcctgacctcgtgatccgcccgtctcggcctcccaaagtgctaggattacaggcgtgagccaccgcgcccagtcgatatgccagttttcaaagataaacgctttcagcttgtatccattcagtatgtttactttgggcttgtcatagataactcattattttgaagtgtgtactttgaatgcctagtttgttgaggattttaaacatgaaggctgataaattttattgaaatctttttctgcatctattgagataatttttttggtttttatctttaattctctttatgtgatgaataacatttattaattgttgcatgttgaaccaaccttgcatctcagggataaagcctacttgatcatagtggagtagcttcttgatgtgctgctggatttggtttgccagcattttgttgaggattttttcatcaatgtttatcaggaatattggcctgaagttttctattttttgtttcatctctgccaggttttggcatcagaatgttgctgtttctatataacgagctaaggaggagtcccttcttctcaattttggaatagttttagtagaatggttcaggcccttcgttttacgtctggttgaattcagctgtaaatttgtctaatcctgggctttattttggatggtaggctatttattacttattcaattttggaatttgttattggtctattcaggaatttagtttcttttttgttcagtctttggagaatgtatttgtctagaaatttatgtatttctattaggttttttagtttgtgtgcagacaggtgttcatagtagacttcaatagttatttgtatttttatggggtcagtgataatttctcttttgtcattaactgtttatttgaatcttctctttattcttcattaatctagctatttaccttatttatttatttcaaagatttatctcggatttcttgttcttttgtatagtttttcatatctaaatcttcagttctgatcttatttatttattttttttgtctgctgatagcttaggagttgctttgctcttgcttctctcgttcttttatttatgatgttaggttgttaaattgagatgtttttgatgtgaccatttaatgctattaatttccctgttaacactgccttagctgtgttgcagagattctggtatgttgtatctttgtttcaaaaacttttaaatttccaccttaattttattatttacccaaaagtcattcaagtgcaggttaatttccatgtgattgtatggtttcaagtggttttctatgtattgaattgtaattttgtcaagctgtggtctttgtgattggtatggtttgaggatttttgaatttgctggggattgttttatttctgattgtatagtcaatttgagagtatgtgccatgtggtgatgagaagaatgtatattatgatgtttttagatggagagttctgtagatgtctactaggactctggtcaagtgctgaatttaggtttaaatatttttgtttattttctgcctcaataatctgtctaatagtatctgtgaggtcttttagccttctactattgtgtcagaatctacatctcttcttaggtctctaagaacttgttttatttatgtgtaccaatacattttttataacacctttttctcttctgttttttttttttcccataagcatattttcaagtgcacacagtgtgcccaaggatactccttagattttgagtgtctgctgaaattcagatgtccaagaatttaagaatatatcaaaagacctggcttttgtaggagaaaatacaaattagaaataagaggatttattctcctataggaaaataagaaaatatattttgcttatcttttttaaagcatttagattttatgtagatatttttctctacttttttgaaatatatataaatcatattaaaacaaaatgaacctcttattattctttgtgactcaggattctttttatttagattcattgctttgtttttgctttggtgtagatatatatatatatatatatggtctttaaaggagacaaagatttgtttagattaaagctcatattaagaacacgtaaggctgggcgcagtggctcatgcctataatcccagcactttgggaggccgaggcgggcggatcacctgaggtcaggaatttgagaccagtctgaccaacatggagaaactccgtctctactaaaaatacaaaaaattagctcggcatggttgtgcatgcctgtaatctcagctactcgggaggctgaggccagagaattgcttgaacccaggaggtggaggttgcagtgagccgagatcaccccatcgcactctggcctgggtaacaaaagcgaaactccatctcaaaaaaaaaaaaaaaaaaaaaacacaaaacattgagcacaaagataggatgaaatttagcaatacagaatgataaaagctgaaagatactgagtacatttctttgacagaaaaccgattatacaaggtattagcatagttacgtgtagtgtttgtagacaacctgcattcatataaattaaacagcattttcttcagtagtatgaatataaggccaaaacatttactttgactgaatactcattaaatagtcattttaatattgctgttcatacttttgaaacatataaagtatatatacatataaaaaatatagtgttttaactgaattatggctacagacaatttaaaaaattcttacatgccttatatctaatacattagttatttatacttagatatttatttctaatatccaaataaaatttactaccaaattgctaaagtagatattagtctgacatgtttattaacttatctaatagggataactataggtaagcataattacagtgtcttcttttttgagacagagtttcgctcttgtcaccccggctggagtgcaatggcatggtctcggctcactacatcctccacctcctgggctcaggtgattctcctgcctcagcctccctagtagctgggattacagacacccaccaccatgcctggctaatttttgtatttttagtagagacggggtttcaccgtgttgtgcaggctggtctcaaactcctgagcccaggaagtttgcccaccttggccttccaaagtgctgggattacaggcatgagccaccatgcccagcctatttatagcgtctttcatttcactatgttggaatgctgctattacaggagaaataaacacagatgatgtggccaccgcaaaaccataatagctctttagttagctatgtggcaagcttaaatacattccactatatgaacaaagtcagattatacatcttcatcaaaagtgctggtggaaattgtgagatgtatttcaatatataaccccccattcaatggctaggagatgagagagcagcagagatggaagagaaatcttataaaattctgctgagaatatatcccttttcttcataatgctcatgtttctcatgctgagagtagctgtgcactttggttgtttagagagaaattccttttaagagaatattttctggctgacttgatcaatcttatatctaaattgagtttttgtttgtttgtttgtttttgagatagaatctcactctgtcacccaggctggagtgcagtggcgcaatctcgactcactacaacttccacttcccaggttcaagtgattttcctgcctcagcctcccgagtagctgggactacaggcttgtgccaccaagcctggctaattttttatatttttagtagagatggagtttcaccgtgttagccaggatggtctcgatctcctgacctcatgatccacctgccttggcctcttaaagtgctgggattacaggcgtgagccaccatgcccggcctaaactgagtttttacttaaaatgcatttaacttttttttttctctaagcataatcttgctcagactgagagctgtttttctgtccaatgctttgggtgtctgcactattaaatattccctgttgtctgtgaatgaggtgggctgtcacagtgagaaattttggagctatctgtacttggacttaatgttggaaatccagcagtagtttttccatgtcacattgtaaataaaaactgaggctgaattactgttccaatgtccattaatgtaaaggtgcagttctccccaggaggcctgcaggctctcctcctgcagctcaggcttccctctctggggtgacactggagtgctgctgtggcagttgtggtttatgtaagatgtgagctttcagatgtgagccctgtgcagtgtgctctgcctcaatggcagatggtagtggtcaagagaggacactagctaacggagagggcaagcaggagagatgtagccaagtgctcagggagtagagagccattgctttaaagtgtaaatagccaaaaagatagcactctattcaaccatttttgtaggagattgagagcctaccttcagcaggcacctggattcaagttgcaaaattacctcctttcatgaagatgtgaaaagtttattttgtcattgaacataactgattagcctgcatggctagccttcccaattaccaggtgaatttaggatgaactgtgtatgacatggtgctatacatttttctacttgtgaactaattacggttactgtctttctatcttttcagtctcttaagcagattgactgtgatgcatgtcacattcaggtttaattgtgtaataaaacagttttatgtctgttctattgtggagtttctctggggctgaagaaaatttatcttttaattatgtttcacaaaaactgtctagaattatcagacatgatatataaatataaggtgccacccaagctttactctagaggaaactttccctctcaggctatcagtcaattcacaattgtgctgcaaagtgcatactgtcccctaaatatgcaggcagaattgcttctctgccaatttggtatctttaatcctccacagtaacttttagagaagctagatcagaattctacaaacttcacagggcagcaatcaaccattttatgtttttcagtgactcttgtatcttccgaactgaaactgattcacagactatggggcccagaaacccaatcagagtaacatatgtgcattgagtagacatgtacacttgggaatctgtacttcctttttcttcatcttgctaaaatgcccacaaatgtgcagggaaaacctgctgctatcccatccattcagaacctaaaactgcaacttcaaattctgaatccaggtcttcagatttgagaaaaaagaaaaactttctttctgagagatgcaagtccttttggttgtccaacttatagagacattaaaatgagagcagaattatgtttctctttttgttttttgaactatgtattcatcttttgaagctgtttgctattgccacaagtagctatatattaataatgcacactggacactataacttgtaccgtaaaacttaatggtgtatatccaatcaataatcaatgttattcctgtaaataataaaaatttctgacaaacaactttgtatcaacccactctctgtccatcttttttagcctttacaaatcaacttgtaatcacactgctaatcaagtgtatgttgcgggcaacttgaatatttgctcccaggttacagtcctcaagcttggcccaaataaactgtcaacttaaatctatattttctcagctttttcgttttaggtagacatatttagaatgtgccagagtagtgtctatgatgagatctctcctttgattgtactctgtttgctgtaacacccaaggaggcagagtctggttgatcccacctggaatctgcacataagatctggcctctgcctaagatttacaagacagggccaaactttgaattgagagtatgcagaaaaccagcagaagacattttctgtattgtgagatgtcaacgtagagatcttaaatcttttctttgagactgtggctctgtgagattttcagatcttttccagtgacctgttacaggtatgtgagagactccaggtataaataaaatctgatgacagaatctgtaagtataaacaggcatcttaggagtgagagatcaaggccacagagtaaccagagccatgactacaactatacctacctgtaaaatgtgatactggagtagagtattgttatttctcttacccaagagctagcaaatcagaagaggtgatctagattctggagcttaaccagggcggttccattttctatttataaccagcctgagtctcttctgcctggctcatcattgggtcattagcccagagtcactggaaaccctctcacaatcacctaggcatctttgagacatttgaggatgtccagagcagaactgtgtcaagctgacaaaagtggttaattctgcttctgtctcagtataagagaaatgagtcatcctgtgtttgttcctcccctcatacaagagatacctttagttggtacccagacaagagtttctccagtttcttggtacttgggtgaaaaacaagaaggaggtcctgagactcaaacaggtaaactaatagcttccatttcatgtggccattaaaaaaatagatgagggagtcatggtccctaccacccaggaacttatagtctagactagcaactgggtacatggttgaattaaacgtcatcatatcattggtacaataaacagatgtgtgcagaaacgcttgggctttatttggactactttatattcttctgacttctgatgtcatcacttgaagggatgtttatgtttatttctatttattttaccttggtagaatacatatgtatattttaataaaattaccctaggaaccataaaagactggtttaaattgcttattagtatatgtcataaaattgggcactgtctaaaaaaatatttaaattacacagattctgggatttaagtgcatcttaggtaagcttaggaaaaacaaaactggaagcactcccagtagcatagagaacagaattctacatagggtccactccctggccaagttctgtttagatccactgtttttggaggccttatttaggtcaggtcccaccctggagtcttacctcacagaactggataaaagagattagagttttggctggggaatcctgcttcatttctagagcgggagtgcagtggcgcaatctcagctcactgcaacctccacctcctgagttcaagtgattctcctgcctcagcctccagaatagcgtgccaccatgcctggctaatttttgtactattattagagatggggtttcaccatgttggccaggctggtcttgagctcctgacctcagatgatccacccacctcagcctcccaaagtgctgggattacaggagtgagctactgcgcctggccttttaagtatctttatgcagctgatgtgcaccagtgatcacatttaatctggcacctgcctttctttcttagattttctttgcatatatctatctttggaaaatgaagtctctcatctttgtttacaggccagaaaaactgggaaaaacacaggttcccccacttgctgaatgtttgacaaaagattcttttttgggccaaaaacaggcatcactggtgagcttgtcagaaattcagaaactcagactttattctagatcttctaaaataaatatgcataacaagatctccagttaattgtacacattaaaatttgagaggtgtcttctaactcagcatgtctttttgatctgaaaaatatacaagacttattctgtatgatgtaaatatagcacaaaaaatgtacatgtttgttatcatgccattagttttatactttattatccagaaaggtatcttatctacactggtgttgcggatcttatgccattcttttttctcagaatttgagactacattagataatatttctgtgttgaaaattattttattggatatgttcggtcatccctataagttagaatctgttctctttattctctcatttcaccttgagtcaaattaaaaatttctgcccatggccacttgggaaatgtatatgtgtctttcgttgtgtttttcagggaccattgacatttagagatgtgaccatagaattctctctggaggagtggcaatgcctggacacggttcagcagaatttatatagggatgtgatgttagagaactacagaaacctggtcttcctgggtgaggataattttaattaagcaattcctattatattctataggtttaatttctcttttctgtagaatgtgttttggtgatttatgcttactataaatgagtttcacatccctgttttctggaaacagggatttataagtgtagaaaggaattttttttttttttttttttgagaaggagtttcactcttgttgcctaggctggagtgcagtggtgcaatctcagctcactgcaacctccacctcccaggttcatgcaattctcctgcctcagcctcccaagtagctgggactataggcatgcgacaccacacccggctaatttttttgtatttgtagtagagatggggtttcaccatgttggccaggatggtcttgatctgttggccttgtgatccacccgccttggcctcccaaagtgctgggattacaggcgtgagccaccgtgccaggccaaaaggaattttttaaagatgtttcatttttacctgaacttttcacatttctgagcagatctgtatttttcactctagattagtggaaattgctgaaattgagtggcataaaatacagttgccacaccttaaaatctcattgccaccaacaatttttgattcagtagtaccaggtagtaaaattaagggcctgtacaaattgaaaatactttctaaatatttagaaatgtatgttataaattagtattgggggatcaatttactagaatattctattacattctctttaatgagcatattatttgggtaatatgaccaatatttatgttatttatttttaataaaacaggtatggctgtctttaagccagacttgataacttgtctgaagcaagggaaagagccttggaatatgaagagacatgagatggtaactaaacccccaggtatgtgagagtgaatacaacagacaacacagataagaggtccagaggtcaaggagaaagccagttctcaaaatgtgacctgagaagctgtgctccaaaggaagtagtttctgggaagactgagattttttaaattttgctctcacgtagaggcatcttctgtcttatgctttaaaattctctaaggattctgttttcattttggtgatctcccttcaagtttacaatgagagccaaagtcgtgttcatggcgtataagggactgcacagtctgactgcttttccattgttattggggacacacaaatatctgtatagttttgagaaactatgttaaaagaacctggctcttttacctcacacttgctctgtcttttaccgtgtgatatgtccagttccttttcgccttccactgtgatcataagcttcctgacctgagacactcaccagaaacagatacaggcacacacttcttgtacagtctgctgaactgtgagccaaataaaccttttttctttataaattatctactctcagatatttttctgtatgcaaaatattatagtctataatgttacctacattttgttttcttaatcttttacatgaattttctattttttattattattgaaaatggggtctcagtgtctgcaacagttatgttgctatatatttcttgcttcacctttgtcaatatttatgtattttggagccctgttgttatacctacctgtacatataaatataataattatagattcctggtaaattgacccatattactattatataatatcaatttttgtctcatactagtacttgacttaaagcatattgtgtccaatataattatgactgtctcacccaattgtggctactatttgcatgaaatataaagtttttaaattctgttacttacagactatttgactctgctaaaattggtctcttgtaggaacatattgcatgcttttttccttaagccactcagtcatcttctttctttttcttttaattaattaattaattaatgaaatagggtctcactctgtcagccaggctggtttgcaatggtgtgatcatggcagtgagctgcagcctcagcctctcaaactcagataatcctctagtttcaacctcttaagtagctggattacaggcacatggcattaaacctagctagtttttttgttttgttttgttttgttttttagagacagggttttgccttgttgctcaggctggtctcacactcctggagtcaggtagtcagcccaccttggcctcccaaagtcctggaattacatttctttttattaagtagtttaaaaaatttatatttaaaatgatttcttaaagaaataaagttttgcactgggcacagtgacttatgcctgtaattccagcactttgggagaccaaagcgggcagatcacgaggtcaggagttcaagactagcctggccaacatagagaaaccccgtctctactgaaaatacaaaaattagccaggcatggtggcacacatcagtagccccagctactcaggaggctgaggcaggagaatcagttgaacccggaggtgcaggttgtggtgagctgagatcatgccactgtgcaccagcctgggcaacagagtgagactccatctcaaaaaaaaaaaaagaaaagaaaagaaataaagttacataccagtttcattgttctgttttatgtttttttttttaacatgttttttctcatttcttgtttaactattttttgtttaattttgtagtggcacgctttgcttattttattttgttttgcatagtttctataaaatttttgtagttatcttgaaaaacggacattatgtaaaatatcttaagattaaatcagtatgttttaatctcataacaatttcaatggaacaaaaaactatatttttatattttccagtttgttattaatattataaattatttcatattgtgtattcagatttatgcagatttacattttgtttttatattctatagaagaattttaagggtttctgcactattattatagtaagaaattttatatatgtctgtatatttacatttaatagaaagctttttttatgttatctagaatcattttattttcaacatgaaagactcattttagcatttctttttttatatgtgtctgtatatttacatttaatagaaagctatatatttatatatggatttttgatactgtctagcatcattttattttcaatataaaagactcattttagcatttcttttttctatatgtgtctgtataattatatttaatagaaagctatatatttatatatgggtttttgatgctgtctagcattttatttttcaacataaaagactaattttagcatttctcttgttatatatgcagagtctcactatgtttttgtgctgatcttgaactcctggtctgaagttatctgactgccttggcctcctaaaggtgtaggattacaagcatgagccactgtgcgtgtccacaatgtagcattttttttttttttttttttttttttagctgtgctagtggtgatgaacacccttacctttcattttggaaagtctttattttttactgtttttaaagtaaaataatttctgatcaagtgttatggattaagaatatttttttttcagccggacgcggtggcttatgcctgtaatcccagcacttcgggaggccaaggtgggtggatcacctggggtatggagtttgagactagcctgaccaacatggagaaaccttgtctctactaaaaatacaaaagtagccgggcatggtggtgcatgcctgtagtcccaggtactcgggaggctgaagcaggagaatcgcttgaacctgggaggtggaggttgtggtgagccgagatcccaccattgcactccagcctgggcaacaagagcaaaactccatcaaaaaaaaaaaaaagcatatttttttcttttattacatcaaaatttggaaagctctgtgttttttttttttttttttttttttgtctttaagtaacctgtatactactttatttttatttatttattttttcttaagttattggggtacaagtggtgtttggttacatgagtaagttctttagttctttaatggtgatttgtgggagttttatgcactcatcacccgagctgtatacactgcaccctatttgtagtcttttatccctcgtttccctcccgctcttcccctcaagtccccaaagtccactgtatcattcttatgcctttgcatcctcatagcttagctcctacatatcagtgagaacataagatgtttggttttccatttctgagttacttcacttagaatgatagtctccaatctcatccatgttgctgtgaatgccattaatttattccattttatggctgagtagtgttccatcatatatataatctcacagtttctttatccactcattggttaataggcaatgggcatttgggttggttccatgattttgctattgtgaatcatgctgctataaacatgtgtgcaagtatctttttcatgtaatgacttcttttcttctgggtagatacccagtagtgggactgctgggtcaaatggtagtatgacttttagttctttaggaatctccacactgttctccatagaggttgtgctagtttacatttccatcagcagtgtagaagtgttccctgatcaccacatacacaccaacatctactgtttttttgattttttttttattatggccatttttgcaggagtaaggtggtatcgtattgtggttttgatttgcatttccctgattattagtgatgttgagcattttttcatgttttttggccatttgtatatcttctgttgaaaattgtctattcatgtccttagctcagttttgatgggattgttttttttcttgctgatttgtttgagtgcattgtagattccagatattagttctttgtcaggtgtatagattgtgaagattttctcctactctgtgggttgtctgttcactctgctgtttcttttgccttgcaaaagctctttagtttcattaagttcccgttttgacactattccacaagatacagagagaaccctccctaatttatctttgtttttattgcatttgcttttgggttcttgtatatgaaatccttggctaagccaatgtctgaaagggtttttccaatgttatcatctagaatttttatagtttcaggtcttagatttaagtccttaatccatcttgagttgatttttgtataaagtaaaagatgaggatccagttttattctatgtgtggctagccaattatcccagcaccatttgttgaaaagagtatccctggccgggtgcggtggctcatgcctgtaatcccagccctttgggaggctgacataggtggatcacgaggtcaggagttcgagaccaggctgaccaaggtggtgaaaccccatctctactaaaaatacaaaaattagccaggtgcagtggtgggtgcctgtaatcccagctactcgggaggctgaggcaggagaattgcttgaatccaggaggcagaggttgtggtgagctgagatcgtaccactgcactctagcctgatcaacagagcaaaactccatctcagaaaaaaaagaaaagagtatcctttacccactttatgtttttgtttgctttgtcaaagttcagttggctgtaagtatttgggtttatttctgggttctctattcttttccattggtttatgtgcctatttttgtaccagtaccatgctgttttcatgactggctttatagtatagtttgaagtcaggtaatgtaatggcttcagatttgttctttttgctttgtcttgctttggctatgcaggctttttttttttgttccacatgaattttagaatcattttttctaattctgtgaagaatgatgatgctgttttgatgggaactgcattgagtttgtagattgcttttggcagtatagtcattttcacaatattgattctactcatcgatgagcatgggctgtgtttccatttgtttgtgtcatctgtggtttcttttagcagtgtttcatagttttccttgtagagatcttttacctccttggttaggcatattcctaagtttttggggtttttttttttcacggctattgtaaaaggggttgagttattgatttgactctctgcttggtcgctgttggtgtatagaagagctactgatttgtatacattaattttgtatctgaaagctttgctgaattattttatcatttctaggagctttcttgaaaagtctagggttttcaaagtgaacaatcatatcatcagcaaacagtgacagttttacttcctctttaccaatttcgatgccctatcttttttctgcttgctctggctaagacttctagtactgtgttgaagaagcatggcgagagtgggcatccttgtcttgttgcagttctcagagggaatgctttcaacttctcattcagtattatgttggctctgggtttgtcatagatggcttttattacattgatgtatgtcccttgtatgccaattttgctaagagttttaatcataaagggatgttggattttgttgaatactttttctgcatctattgagatgatcatatgatttttgtttttattcctttctatgtggtgtatcacatttattgacttgcatttgttaaaccatccctgcatcactggtatgaaacctatttgatcatggattctctttttgatatgttactggattcagttagctactattttaaggattttagcatctattttcatcagggacatcagtctgtggttttcttttttggttaatgcccttttctaattttggtattagggtgatgctggcttcatagaataaattaggaagggctccctctttctctgtcttgtggaatagtgtcaatagcattgctaccaattctttgaatgtctggtagaattctgctaaattctgtctggtcctagactttttttgtggatgattttaaaattaccatttcagtctcgctgcttgttattggtctgttcagggtatctaattcttcctgatttaagctgggtgggttgcatttttccagaaatttacccatttcttttaggttttctagttagtgcacttaaaggtgttcatagtagccttcaatgatcttttgtatttctgtggtgtcagatgtaatatctcctgtttcctttcttattgaggttatttggattttctttttttcttggttaatcttgcttatggtctgtcaattgtatttatctttttaaagagccaggtttttgtttcatttatcttttggtttttgtctgttggtttgtttcaatttcatttcattctgctctgattttgattattttttttcttctcctgggtttgcgtttggttttttcttgtttctctagttctttgaggtgtgaatttagagtgtctgtgttctttcagactttttgatgtaggtgtttggggctatgaactttcctcttagcaccgcctttgctgtatcctagaggttttaataagttgtgtcacttttgttgttgagtttgaagaatttttttaatttccattttgatttcatatttgaccccatgattattcaggagcaggttttttaatttacatgtatttgcatggttttgaaggttccttttggagttgaattccacttttattccactgtggtctgagagagtgcttgatataatttcagttctcttaaatttattgaggttcattttggggcctatcatatggtctatttggagaaagtttcatgtgctgttgaatagaatgtgtattctgcagttgttggatggaatgttctgtatatatttgttaagtccatttgctccaaggtatagtttaaatccattgtttatttgttgactttctgtcttgatgacctgtctagtgctgtcagtagagtattgaagtcctcactattattgtgttggtgtctatctcatttattaggtctactagtaattgttttataaatttgggagctccagtgttaggtgcatgtatgtttaggactgtgatatgttcctgttgtacaagaccttttaccattgtataatgtccctctttgttttttttaattgctgttgctttaaagtatattttgtcatatgtaagaatagcccttataaacctcttgtttagcatgatattgtggggttctctggcttaggtgaatagcaagccattttcatgaattacctcatgccattaggggaagaggtatcctcatttttttcaattttttatagtgatctgtgttcctgtttctctcattcagtgttatttaatttatttgaaattttaaaaattaatttattaatcttcattgttttatggttgctttctaaaaattttatactttttttgattgggccatgttgtcctaatattctatatacattgtaatcgttgattaaaatttgtacatcaaaaaagctacctgttggaatcttcataatgtagccttgtcctggaatagtctgaaaccaattgtcttggctagagattctgggagtctgtcaaacatgttcttagaatgtgtcttgtctgaaattgtgtgtgtgtgtgtgtgtgtgtgtgtgtgtgtgtgtttagataaagaacgttattcaggtttcttctcaatagtaatcacttgctacatctattttttgtgtgtgtggtactatattcagtgctgctgtaacatctaactttggtctcagcagactcaagctgtcattttaaagtatgccaccatttctttcagcactttatgtcatcagagacaaaaaccagaaaggcccctggaagccagaaataaatatatatgtgctactggtttttttgtttgtttgtttttttgagacagagtttcactctttttgcccaggctggagtgcgatggcatgatctcggctcacctcaacctccgcctcccaggttcaagcaattctcctgcctcaacctccctagtagctgggatttcaggcgtgtgccaccacgcccagctaattttctatttttagtagagatggggtttctccatgttggtcacgctggtctcgaactcccgacctcaggtgatccgcccacctcggcctcccaaagtgctgggattacaggcatgagccactgcgcctggccatgccactgttttatttgtctttaaacaataaaccaggagttggcaatttccttttttttttgagacagggtctcactctgtcacatgggctggagtgcactagcataatctcatctcactgcaatctctactccccaagttcaagtgattgcctcagcctcccaagtagttgggactacagacgtgtgccaccacatctggctaatttttgaatttttagtagagatgaagtttttccattttgaccaggctggtcttgaactcttgatctcaggtaatccacttgccttggcctccaaaagtgctgggattacaggcatgaactgctattcccagtcagcaatttacttctaaagagcctatgctatttttggtagcaggaagagctgcattgggaaactgtaaccgacttccctttccttctgtgtggctctttgcattgtgcttacttggggtacttaacttacatataaattttccacaaatgtatttggtcagtatgtttttgttacatttatatgtctatgaagaaattagggcctgtcttattttgctgtgccatcttatgtggtttgcataattttataggttagatttgtaaagtatattcatctgagtctagcaagtggaataatttgttatttttatttcttctagttatgcgttctcattttacacaagacctttggccagatcagagcacaaaagattctttccaagaagtaatactgagaacatatgcaagatgtggacataagaatttacgattaagaaaagattgtaaaagtgccaatgagggtaagatgcacaaagaaggttataataaacttaaccaatgcaggacagctacccagagaaaaatatttcagtgtaacaaacatatgaaagtctttcataaatattcaaatagaaataaggttagacacactaaaaagaaaactttcaaatgtataaaatgtagcaaatcatttttcatgctttcatgcttaattcgacataagagaattcatattagacagaatatctacaaatgtgaagaacgtggcaaagcctttaaatcgttctcaacccttactaaacataagataattcatactgaagacaaaccttacaaatataagaaatgtggcaatgcctttaaattttcttcaacgttcactaaacataagagaattcatactggagagacacctttcagatgtgaagaatgtggcaaagcttttaaccagtcctcaaatcttactgaccataagagaattcatactggagagaaaacctacaaatgtgaagaatgtggcaaagcttttaaggggtcctcaaattttaatgcacataaggtaattcatactgcagagaaaccctacaaatgtgaagattgtggcaaaacttttaaccatttctcagcccttagaaaacataagataattcatactggaaagaaaccctacaagcgtgaagaatgtggcaaagcttttagccagtcctcaacccttagaaaacatgagataattcatactggagagaaaccctacaaatgtgaagaatgtggtaaagcttttaagtggtcttcaaaacttactgtacataaggtagttcatactggagagaaaccctacaaatgtgaagaatgtggcaaagcttttagccagttctcaacccttaaaaaacataagataattcatactggaaagaaaccctacaaatgtgaagaatgtggcaaagcttttaacagttcctcaacccttatgaaacataagataattcatactggggagaaaccatacaaatgtgaagaatgtggcaaagcttttaggcaatcctcacaccttactagacataaagcaattcatactggagagaaaccctacaaatgtgaagaatgtggcaaagcttttaaccatttctcagaccttagaagacataagataattcatactggaaagaaaccctacaaatgtgaagaatgtgggaaagcttttagccagtcctcaacccttagaaaccatcagataattcatactggagagaaaccctacaaatgtgaagaatgtggtaaagcttttaagtggtcatcaaaacttactgtacataaggtaattcatactggagagaaaccctgcaaatgtgaagaatgtggcaaagcttttaagcatttctcagccctcagaaaacataaggtaattcatactagggagaaattgtacaaatgtgaagaatgtggcaaagcttttaacaattcctcaatccttgctaaacataagataattcatactgggaagaaaccgtacaaatgtgaagaatgtggcaaagcttttaggcaatcctcacaccttactagacataaagcaattcatactggagagaaaccttacaaatgtgaagaatgtggcaaagcttttagccatttctcagcccttagaagacataagataattcatactggaaagaaaccgtacaaatgtgaagaatgtggcaaagcttttagccatttctcagcccttagaagacataagataattcatactggagagaaaccctacaaatgtgaagaatgtggtaaagcttttaagtggtcatcaaaacttactgtacataaggtaattcatactgcagagaaaccctgcaaatgtgaagaatgtggcaaatcttttaagcatttctcagcccttagaaaacataaggtaattcatactagggagaaattgtacaaatgtgaagaatgtgtcaaagcttttaacagtttctcagcccttatgaaacataaggtaattcatactggagagaaaccctacaagtgtgaagaatgtggtaaagcttttaagtggtcctcaaagcttactgtacataaggtaattcatactggagagaaaccctgcaaatgtgaagaatgtggcaaagcttttaagcatttctcagcccttagaaaacataaggtaattcatactggaaagaaaccctacaaatgtgaagaatgtggcaaagcttttagccaatcctcatcccttagaaaacatgagataattcatagtggagagaaaccatacaaatgtgaagaatgtggtaaagcttttaagtggttgtcaaaacttactgtacataaggtaattcatactgcagagaaaccctgtaaatgtgaagaatgtggcaaagcttttaagcatttctcagcccttagaaaacataagataattcatactggaaagaaaccctacaaatgtgaagaatgtggcaaagcttttaatgattcctcaacccttatgaagcataagataattcatactgggaagaaaccatacaaatgtgcagaatgtggcaaagcttttaagcaatcctcacatcttactagacataaagcaattcatactggggagaaaccctacaaatgcgaagaatgtggcaaagattttaacaattcctcaacccttaagaaacataagctaattcatactagggagaaattgtacaaatgtgaagaatgtgtcaaagcttttaacaatttctcagcccttatgaaacataagataattcatactggggagaaaccctacaaatgtgaagaatgtggtaaagcttttaagtggtcctcaaaacttactgaacataaggtaattcatactggagagaaaccctgcaaatgtgaagaatgtgacaaagcttttaagcatttctcagcccttagaaaacataaggtaattcatactggaaagaaaccctaccaatgtgacgaatgtggcaaagcttttaacaattcctcaacccttacgaaacataagataattcatactggggagaaaccctacaaatgtgaagaatgtggcaaagcctttagtcagtcctcaatccttactaaacataagataattcattctgtagagaaaccctacaaatgtgaagaatgtggcaaagcctttaaccagtcctcacaccttactagacacaaaacaattcatactggagagaaaccctacaaatgtgaagaatgtggcaaagcttttattcagtgctcataccttattagacataaaacaattcataccagagagaaacctacaaatgtgaagaaagtaccaaagcttttaagcaatcctcacaccttactagacaaaacaattcatactggagagaaaccctacaaatgtgaagaatgtgccaaagctttttaaccatccttcaacccttactaaacatatgataattcacactggggagaaaccttagaaatgtgaataatgtggcagagctttcaaccattttataaaccttaatacacataggataatttatactagagacagaccctgcatatgtgaagaatgtggcaaagcttttaaccagtcctcaagccttactagacataattcatactggagagaaaccctacaaatgtaaagaatgtggcaaaactttttttttttatactttaagttctagggtacatgtgcacaatgtgcaggtttgttacataggtatacatgtggcatgttggtttgctgcacccatcaactcgtcatttacattaggtatttctcctaatgccatccctcccgcagccccccaccccctgacaggcctgggtgtgtgatgttccccaccctgtgtccaagcgttctcattgttcaattcgcacctatgagtgagaacatgtggtgtttggttttctgtttttatgatagtttgctgagaatgatggtttccagcttcatccatgtccttccaaaggacacgaacttatccttttttatggctgcatagtattccatggcgtatatgtggaatgtggcaaaacttttaaccaatcctcaaaccttactagacagaaaacaattcatactggagataaacccatcaaatgtgaagaatgtggcaaagcctttgaccagtcctcacagcttaaatacgcataagataattgatactgaaggaaaactctacaaatatcataaatgtggcatagcttctaaccattgctcagcttttactcaaaatgagagaattcctaaagaagataaactccacaaatgtgaataatatggcaaagcttttgaccggtcctcaaatcttactgaacataagataattcatgctagagacaaacactacaaatgtgaagaatgggcaaagcttttaaccagttctcaaaccttactcaaaataatttatagtggagaggaacgctacaaattcaaaggatttggcaaaacttttaagtgtttctcaaaacttactgaacacaagataattcatattagagagatactttacaaatgtgaagaatgtggcaaagcttctaacgggttctcaaatcttactgaatgtgagataatttatattagagagaaaccctacaaatgtgaagaatgtggcaaagcttctaacgggttctcaaatcttactgaatgtgagataatttatattagagagaaaccctacaaatgtgaagaatgtggcaaagcttttaactggtccttaaaccttactgaacataagataattaatactaaaggaaaccctaaacatataaaaaatgtgacaaagcttttaactggttttgagaccttactcaaaataagatagtttatactgaagacaaactctataaatgtgaagaatgtgacaatgcttttaatcaattctcagactttactagacgtaagaaaattcgtactggagaaaaaccctacaaatgtgaagaaagtgggaacacttttagccagtcctcaactcttactaaacaagataattcaatgggagagaaaccctacaaatgtgaataatgttataaccattctatttatgtgtttacatgtttagtgttgaaataatgtttatttttcatattgatattacaatttggagacatttttcactcacaatttttgaagtgggtgaatttcagtctacagtttttatttttagtcacttcactgtaggcaactctggtaattttctctggaaaaattttggagacgaagttgtaatggctttcaggttaaaacatttcctgttattttgcatgcaaacttgtttacggtgttcaaacagtggccaatctttaggtcataaacaacacctacccttttaatgtctttcataccattgcaattagcaccaaaaacttctgctgtcttaaacttaaaataaaagccctaatgtacgttggctcctcccatgcacggtactgagttcagaacatgctgttaaatgtcagagttcctatggttatgactgaaaaattaaatgacaagacagcacaaaactatatacttttgataccatttagccaagttaatgacaaagacagagaatatttgaaaaaattgatatccttctataatgttttaaatatatatttttcaacttgacagataaagcatgtattctgtaaaacatgatgttttgaagtatatatatacattgtcaaacttaattttaggtaattaatgctgtacctcacatagttaacatttttgtggtgagagcacatgacattgtcctagcattattcaaaaatacattattattaactatagacaccatgctgtacaacaagtcttttgaatatattacttttatctaactataattatgtattattctttgacaaacatctttctaaagccctcttttagataccttggcatctggtggttacaattttattctgtgcttcagtgaatttaagttttatatcattcatgtttaggtgaaatcataaaattttctttctgttcctggcttattaaaagataaatagataaattttatatatatactactttgtcagtatttaatcattagatgttgaactgttgattctatattttggctattatgaagagtgttgcagacaacatagaaatacaaatatttctcattctgatttcatttgtttttaaatatatatatatcctatagtgaaattgctgcattatatggcagttttattttaaatttattgagaaatctctatttcggttttcataatggctgttctcatttacactcagactagcagtgtgcaagcattccttttacttcacatctttaccaacacttttttttctttttaataagagtcattctaatatgagtgactttttatctcatagattttttggcttgcctttctctgataataagtgtaattgagcattttaaaatatctcttggccatatgtatgtctttttaaaatatttaagccttttgctcatttttcatagttatttgtttttttattgtatagtcactttcttacatgatcttgatattcaccccttgtcacaagtatggtttgcaaaaatgttctcccatttgtcttgttgattatatcagattctgtacagcaactttttaatatgaagtaatctgactcatctatttttcctttagttccctgggattttgaggttaaattaaaaaaaattactgttgaaaccaatgttacggggctttcagtctatattttttgtagtagtttcagagtttcaggccttacatttaagtattaatatattttcagttgatttatatatgtggagtaagatgagagactcattgctctgcatgtggctatagttttctcaacactatttattgaagatactgtcattttcctaagaaattgtcacctatataaaaaatcagttagctttaaatacatggatatatttcctgtctcttgtgctccattggcctgtgtgactcattttgttcaagtaccatactgttttcattactatagctttgcagtatatttcaaagtcaggtaggatgatacctttagcctttcttttttgcttgaatgcttctgctattcagggtcttttgtcatatcatataaattttagggtttttgtttgtttttgttttattttagacagagtttcactcttgtcacccaggctggagtgcgatcgtgcaatctcagctcactgcaacctctgccctcaggtttaagtgattctcctgcctcagccttctgagtagctgggattacaggcacacaccaccatgctgggctaatttttttttgttgttgttgttgttttaaaaatgtgtgggtttttttatagtatttattgatcattcttgggtgtttctcggagagggggatttggcagggtcataggacaatagtggagggaaggtcagcagataaacatgtgaacaagggtctctggttttcctaggcagaggaccctgtggccttctgcagtgtttgtgtccctgggtagttgagattagggagtggtgatgactcttaaggagcatgctgccttcaagcatctgtttaacaaagcacatcttgcaccgcccttaatccatttaaccctgagtggacacagcacatgtttcagagagcacggggttgggggtaagcttatagattaacagcatcccaaggcagaagaacttttcccagtacaaaacaaaatggagtctcccatgtctacctctttccacacagacacagcaacaatccgatctctctctcttttccccacatttcccccttttctattcgacaaaaccaccatcatcatcatggcccattctcaatgagctgttgggtacacctcccagacggggtggcggccgggcagaggggctcctcacttcccagacggggtggccgccgggcggaggggctcctggcttctcagacggggcggccggtgggcggaggggctcctcgcttctcagacggggcggctgggcagagacgctcctcagttcccagacggggtcgtggctgggtagaggcactcctcacatcccagacggggcggcggggcagaggtgctccccatatctcagacgatgggcagccgggcagagatgctcctcacttcctaggcgggatggcggccgggaagaggcattcctcacttcccagactgggcggccaggcagaggggctcctcacatcccagacgatgggcggccaggcagagacgctcctcacttcccagacggggtggcagccaagcagaggctgcaatctcggcactttgggaggccaaggcaggtggctgggaggtggaggttgtagcgagctgagatcacgccactgcactccaacctgggcaacattgagcactgagtgaacaagactccgtctgcaatcctggcacctcgggaggccgaggctggcagatcactcacggttaggagctggagaccagcccggccaacacggcgaaaccctatctccaccaaaaaaatatgaaaaccagtcaggcgtggcggcgcgcgcctgcagtcccaggcactcggcaggctgaggcaggagaatcaggcagggtggttgcagtgagccgagatggcggcagtacagtccagcctcggcttggcatcagagggagaccgtggaaaggggagacgagggagagggagaacgtagaaaggaaaagggagagggagagggagagagctaatttttgtatttttagttgagatggggtttcactgtgttggccaggctggtcttgaccccgcctctgcctcccaaagtgctgggattataggtgtgagccactgttcccaggcttgagcacacttttattagtttttctctgtttagtccttttgtttgtttctattttaataagaattttaatttctacctgaaattactaatttgagcccaaagtatctgagatgtcagagtgtcaggaggttgtgacaatgcgtgcccaaggttgttggggcacatgttggttttatacattttagggagacaggagacatccatcactatatgtaagatgcacattgttcagaaaaggacaacgcgaagtggggcgggagcttccaggtcataggtagataaagggcaaatggttgcaatttcctctgagcttctgattagccttttactgggttttttccaggtctgtctttcctaagcctccaagtttatctggagtcaagagaaacttgactccatgtttgtagaattttaatctattttggccaattttatgtctactttataacatataacaacaggtaatttaaccaaaacccttatggttttcttgcacagctataagctacacatgtattcttagcaaggtaaaaacaacagaaaccatgatgattacaataaccacccttctgtgcatgagtagcccttcagctgggacatcacaccccactgtagagtttctgaatcctacacctgaaggcagtcaaaagttggaaaattgtcttgcacacatagatctggtccacaggtaggttggtgactcccacaccatgattcagcacacccacgaaatggtgaatttactaagaagacaaagtttacaggaagaatagaggctctgatgcagtccactgttgagattgtgactcatgtacttagactcaacattcaggaggtgttgactcttatacctaaaactgggacatgtatggaattgttaatctcaccgtggatcttctgtagatgttattgtgacatatgcctctcccatgacatatgcctctcccagcacctgagtgatttgactctcttgggtcccagctgacagatgggattgtggcatatcactggacacagcacctaggtgatgtgacactattctcctgccttggcactacctacctggggctttgtgacacgtctgtgctcataactaaggggatgtgattctcttctcttgcctgatgtctgctcacgtgggagacaatgacatatcgctgggcccaatgccaaagtgacattgcttttttaccttgaccctcttctcagaaaacatcgtgacgcattgttggggcacagtcaacgtgacgtgagtctcctgcatgaaccctgaccacagagaccatcgtgacataatctctggaagctcaactattggaaatgattaccttgttatacctgctctttgcccataggagagaatgtgacatatctctgggcccaggacttagttgatgtaactctgctctcctgcctgggctatgcctacagaagaaagagtgacttatcactgggcccagcacacaggtgatgtgattctactgccttgatccttgtccataggaatcatcattacatacttgtgggctcttctgctggatgatgtgtgtctccttttctgtccacagaggagattgtgacatatcacttgacccagcacctacatgatgtgcctctcatgccttggcttttcccactgggctaattgtgacatatagctgggcacagcttctaggtaatttaactcttctcttcctgagtcctacccacagggggcattgtgatgtgtctctaagcacttcacctaggtaatatgactcttttccttgaccctcccctaatacggtattgtgacatatttctggaccaccacctaggtgatgtcactcttttctcctaccttttactggaagtgaattcatacgggtatgagtgcaggaacctcgattcttgccttagaagaaacaactcgactgaggggcataaagcaggagagaccgaagcaagttttaaagcagcagtaaaagttcattagaaagctacagaacagaaacaaaaggaaggaaagtacacttggaagagggccaagtgggtgacttaaaaggcaagtgcacggtgtgactttttgacttgggattttgtatgttgacatacttccggggtcttgcattacttccccctacttgcccaactcttgagatcttattgggaagctgctgatcactagttgtaggtgatccactagttgcccacttgagaacagaggagatactggagtgaactgtggccccctcttcatccttggggttcaagtcttaccatgcacacctagcttttgatctctgttttatgggtctcttgcacctgtggccttggcctggcctacatcattgactccattgacctctagtgactctagttaagagcattctagcaacaaaataagtatttctcttctcagatttccacttcccatgttcttttagtatatgtgaagcccatttttcagctaactgcccaaagggggctagacttccctccccactctttttatatatgaccttgaaggtcttgatgcatattgagaagggcaggaaagtaattagaaaaatggaggctacagaagaaagtgaacggaagtgagaggaatactcaagggaagacttcatatgcttaacaaaacagcagcccttggattcaagaggataataatgttcatccaaagcaggtggacaaactgcttcaaaagtcactgagaaactcattcctggggcataacagaaatgagaagtatatgataagtcataagctgtcagagccagagttggaattagtgtggattagtggaattagattagaggcttatgtctggaccctatctacaaggaaattgtgacatatctgcgttcatcagcaaaaagtagtgactctacttttttctactgggaagattgtaacctattactgggcgcagaaaacaggtgacatgcttctcctgcctgggccttggccacaaaaagttttgggatataacatggctcagcacccaggtgatgcaactctgccacctgtgccctgctttcaggtggggattgtaacatattcctggctaagcatcaaggtgatgtgactctcctgcctggtctttgccctccgaaaatattgtgacatattcctgggccagtgccaaggtgacgtaactctcttactcattccctacacacaggagggatgttgatatatatatttgctgagatcactgatatgatgatgacatttatacaaaaaaaaagttataccactccctcacatacagtataaagccgtcaagtggtacaaactcatcacaggacacagcacaaatatgagattgttttttgtgtgtgcaacctgccaacctttaaagtcacccacacacatggacagggtccaattttgaagtcctgaaactcacaagtagacacagttcaaagttaaaattgtgactgtcatatgtgaacacctggccactgttgggttagtgactgtttaataaacccagcttataggcaggtaaaatctttccaatctggactctcctaattgaagagatgttgactcatacctgggcttagggccacgggtacaatcacaggtccatatcagtacaaatgtgtcagagtagattgtgactttcatacataatgtataaagccctcgggtggtacagagagtgtcctaacaggaccgagaacacggatgagaatatgacactcatgcatactcacccaacagtcaagattgtcatctttccacatgaacacagcccacagctgaggaactgaatctcacaactggaggcaaagggtggacttttcacatgtggaaccagtcaaaaggagggctggtgactttcagaccatgactcagcatacctgtaaggctgtgactaaggagacacagtccacaaaagtgattgaggctctcatgcacgattccagtccaccattgagattgtgactcctgtatttagacataacatacaagaggtgttgactcttgtacctggaaccaacacacgtgccaaattcttttcttttttctttctttttttttttttgagacagtcttgctgtgtcacccaggctggagtgcagtggcataatctctactcattgcaacctctgcctcccgggttcaagaaatcctcctgcctcagcctctcgagtagctgtgattataggcacacgccaccacaaccagctaattttttgtatttttagtagagatggggtttcgtcatgttggtcaggctggtctcgaactcccgacctcaggtgatccgcctgccttggcctcccaaagtgctgggattacaggcatgagccaccacgcccagcaactaaattgttaatctcattactagaccttcctgtaggtgacagtgtgacatatgcccctgcccaccacctgagtgattttgagttttctgcctgggctcagtcaaatgtaaaattgtgagatatctcttgactcagtatctaattgatgtgactattctgctttgtctgtaaccacaggtgacattgtgacatatttctgggccttgtacgcaggtgatgtgactctcctctcttgtcttggcgatgccccagagggcactgtgacacattactggatcctgcaccccggatatttggctctcctacctgtgccctgcccacatgggccattgagacctattgctgagtcccaagacccatgtgatgtaacttacctgctagagctctttctataaggggcatttgacctatctctgcctattatccaggtgacgtgactcttttctccaacctggtctcagtctacaggaaaaattgtgacatatctctgagactagctcctagctgatgtgacttttctctttttcctagcttctgcccactggggagattgtaacatgccccttgtcccagcactatgttgatatttactcttgccttcacgctgcaatcaaagatattgtgacatatttctgggcccagcgccaaagtgatgtgagtctcctgcctggatcctgcccataaggggtattttgacatatctttggacccatcaattcattgatgggaccttgtctcctatgagctttgccctggaccatctgcacaaaatagagaacgacttatcactgagcccagcacacagatagtgtgactctcctgccaattccctaccctcaaaaatgattgtgacatattcctggagaaggacccagatgatgtgattctcctgcctgctccttacccacaagtaagattgtgacatatatctttgctcagtttacaggtgtgaccatgacttttttacctcaaaccagccaatatgggtaatactatgggtcttccctttgttcgaaggtaatagagggttaccactttgttgcatatcatataaagatcttgggtggtacagagagtgtcaacacaaagcctggcacacaggtgaaattgtgttttacatacaccctgccaaccatttcattcatcacattcacacatagacaaagcccactggtgaagttttaaaacacacaggaatgcagcttacaattggaattaagactttcatatgtgaagatttggccacacttggaatggtaacttatttttaaatccactcataggtgggactctcctatctggactgagccaataggagtgatgttgactgtcatatctttgcttagggccacaggtacaatcattggtccataccagcatgaatgcctcagagtgaatggtgacactaacatacactgtataatgccatcagttggtacagaaaatgttttcacagggcccagcagacaggtgagattgtgaccctcatatgaacatccagctgaaagtaaagatggtcaaccacccagctgaaagtaaagatggtcaagtaaagatgtaagtcatacatacatcaacacagtgcaccattgaggttctaaatctaacaaccagaggcagtcagaagattttttttaaaaaaggctcttatacataaatgtggtccacaggtgggttggtgactctcagaccaggattcagcacaccaagaaaactgggactccattaagtcaacacaacatgcaataggaattgaggctatgacgcatagatctggttcactgatgagacgtgcctcatgtagttggacccaacattcaggatgtgttgactgtcatatctgaaactgggatatgtgcaggattgttaatctcatccctggaccttcctgcaggtgtgactgacaacatgtgcccagcacccagcataatttgaagtctcccacctgggcccagctcacagttgaaattgtgacatatcactgaactcagaacataggtgatgttattctactcttctgccgtggccctgcctacatggagcattgtcacatgtttctaggccccacactcagcactcaggttatatgtctattctgcctgtgcccagcccatgtggatcattgtgatatatttttggggctgacatttatgttttgtaagcctcctgcctggggtttgccagtagggagcattttgacatatctatgtgccaatcgtgcaggtgatatgaaccttttctactggctggtttctgctcacagggaagattatgacctatcagtaggccaacaggtaattggtgtaactcttagtctcaggttctgcctacaggggagattgtgacatattgctgggctcagcaacaagatgatttgggtcttctgcctggaccctgccttgtaggagcattgtgacataactctgagccaatcacctagttaatgtgaattttctcttctcttacctgaactgtgcccatagaatagattgtggcatatctctaggaccagcgtctaggtgatatgactctcctctcttacctgaccatgcccacagaaggaagttacttatgactgggcccagcacacaggtgacaggggtcatggagacctatctctgggcccatcacctggatgatgtgactcttcttttcttcatagggcccgtccatgtgaggaatgtgacatattgctgggcccagcatctatgtgatgcatcacttctcttgtgccttatctctttcaactggagtgattgtgacatgaagcccctaatttatgtgactcctcttttccatctgagccctacccacagggggcattgcaacgtatttttgagaccctcccctaggtggtgtgactctcatgagtgagccgtccactcagttggtattgtgacacatttttgcacacagcactgaggtgatgtgactctcttctactgcttgggctctgtccaaggaggtattgtgatataccactgggtccagcacctaggttatttgacttccctctactgcctgggccctgcatacattgtgtattgtgacatatggctgtgtccaaaacataggggatgcaactctcctgcattggctttgcccatagaagtattagaaaagactaataaaagagaataaaatatcttaattattcatctaggtgatttgactcttcttttgtgcctgagcactgcacacagctgagattgtgacagtgatatgcacacccagccaacagtatagactgtcatcatcccacctgaacacagcccactcttgaggttctgaatctcacacccaaagccagtcaaaaatagtgaattgactctatatgcagatttcattcacatttgggtttctgactctccaaccaacattcagcaaacctgtgaggctgtcactctactaagaagacagtccacaggacagattgatgctgtcatgcatggatccagtacaccattgagatcatgactcatgtacttatacccaacatgacatttcactgggcccagcaccaagctgatgtcactcctctattatccaggttctcactctcacctagttgacgtgactgtcttacctgtgctgtcttgtcaagggatatggtgacatattactggacccagcacctagttgatgtgacttttgctgctcctagggctcacagtcctaaaaaagaattgagttgtactgctgggcctagcaccaaggcgacaatactgttagctgtgtctgcatatcaaagtcataatctcacctgtgtgctggcccctgtaataaaactctgtactgccagggggcattatacaatatgaataagtttcataatctgccgtgactttcatacaggtaggagactcaggaccctaccagtttccttaagctcagctataagggtcaacatgtattttattggctgggtctagttataagagtcatcatggtgcctgtgagctaacatcacgcctgtggctggatctacatatgacagtcaaaattccagctgtaggctgtgtccatatacgagactcaggacctcactagaggtctctgttcatgtgtgagaatgacactcataactgttggctggatgagcatacaagagtcacagtctcatctgtgtactgggtgcacttatatgttaaaatcccacttgtggaaaagaaagaagctaagagagccacgtattttaagtgctgggctaaagatatgttaaaatatcccctgtgggcagggcccaggaaggagagttaaattacctgcatgctgtgaccagtgatatgtcacaatgccttctatgggcatggcccgggcaggaatttcacattacctttatgctgtcccaaagatatatttcaatccccctccattggcatggcttagagagaatagaagagtcacagcacctaaattatggccacagagataaatcacaatacctcctgtgggcagggcctaggatagaagcttacatcacctgtaatctgggcttgctaaaataattcatcctcctgttgccatgacccaggcagaagaggagaatcatatcatctaagtacttgggcctgtggtatgtcacagtccattttcaaggggcagaatgcaggcaaaagaaaaaagtcacatcacctaggcaacgagttcagaggtatgtcacaatacctaccgtgggcagggcccaggcagtacagtcacatcaccgaggtactgggctcagtgatatctcacaaatggctttctgggcagggcccaagctaatgataagagtcagatgacccagtgatatttcacaataccctctgtgggcagggctcaagcaagagaatcacatcacctaggtgcttgacccaggtatatgtcacaatctcccctgagggctgtgcccaggcaggaaagtaaaatcactcaggggttatgcagaagtatatgtcacaatcacacttgtgggaaggtccagggatgagattcacagttccacatatgttccagcttcaggtgggaaagtcaacacctcccatgagttgcatccaaatgcgtgagtcacaatctcaatgacggactagattcatgcatgagaccctcaattttaccggtaggctgtgtactggtatcagaggcaaagcctcacaggtataatgaatcctggtcctatagttaccgtctacctggagacaaaatctacatgtaaggattataattccaactttcaactgtgtccaggtgtgagattcagaagctcaagagttgtctgtattcatgtgggaggatgacaatttttactgtgggctggaagtgtatatgagaatcacaatctcagctgtgttctgggtcctcttatgacactctctgtaccaccagagggctgcacattgtttgggtgagactcacaatcccctgtgagacattagtgctgtataaatgcatgattttacttgttgccccactcccaggtatgagagtcaacatttctcatattggctgtgtccaggtataaaagtcattgctctgcctcttagttgggttcagatatgagtcaccatcccagtggtggctagaggtacacatgacattaaaaactccaactgtggattgcatctgtgagtaaaattcaggacctcaccagtgggttctgtccgtgtgtatgaatggcaattctctactgttggctgagtgtgcatctgagagtcacaatctcaactttgtgctgagttatgtaatggcactttctttacaaccctgggggcattatacaatataagtgagtgtgataatcctctgtgacatttatacaagcagaaaacccaaaaccttacctgttgccctaagcctaggtacaagagtcaaaatatcttctattggccaggttcattgtgcaagtgagttgggtacagaaatttgtcaccatccaacctgtggctggatccatatatgacagtcacaatttcaatggtggaatgggttcatgtgtaagatttaggacatcaccggtaggctcggtctatgtatgagcatggcaattcaaactgttgactaggtatgtataaaagagtcacaattacacctgtggactgggccctgcaatgacagtatttcccaagagctttatacaacatatgtgagtgtcataatcttctgttactttcctacaagtaaaggacccagaccccaaagcctagctaccagagtcaacatctctcttattagctgggtccaggtatgagtcatcaccattcctgtgagctgaatccagagtgagtcactatctcacttctggcaagatatacatatgacagtcccaattccaactgttggctgtgttcacatataagactcaggacctcaaaagtggtctttgttcctgtgttatagtgacaatagtaacttttggctgggtttgcatacaagagtaaaactctcatctgtgtgctgggccgagttatatgtcacagtcttaccttagggaaaggctgagaaataagagtaacgccaccttgattcttcacctggaatatgtctcaatcccctctatggaaaaggcccaggcagaagagtcacatcacttgtgttcagggcccagcagcatataatatttcctctaggcagagcccagacaagagattcatgacatttgggtcccgagcccagagatatgtcacaggggactaaagaatcttttctttaggcatgtttttggcagcggagagaagcacattatgtaaaaaattggttcaaagatatctcacaatgtccccttcgggtggtatgcaggtaggtgaagagagtcacatcatccagataatcagcccagcaatatgtcaaaatgccccctgatggaagggcaaataaaagaaagtcatggccgggcacagtggctcacacctgtaatcccagcactttgggaggccaggtgggcagatcacctgaggtcaggtgttcgagaccagcctgaccaacatggagaaaccctgtctctactaaaaatacaaaattagctgggtgtggtggtgcatgcctgtaatcccagctactctgaaggctgaggcaggagaatcacttgaaccagggaggtggaggttgcagtgagccgagattgtaacattgcactccagcctgggcaaaagagtgaaactccatctcaaaaataaataaataaataaataaataaaaattaaaaataaagtcacataaccgaggtgagtaaaccagagatttcacaatgcatgctataagtagggaccatggaaaagaggagcttcacataacctaggggctacacccagatatatgtcacaatcaccccagtgggcagggcctaggtataagaggagagtcacaccacacaaatcctaaaccaagtgatatgtcacaattcccactgtggatgggtccaagaaaaaagaaaaaagtcacatcatctacatgttggggccacagatatgtatcaatgttccctgtaggtatggcccaggcagaagaggtaagtcaagtcacccgggtgcagagctgagagatacgtcacaatgtcttctataggcaaagcccaggtacaaaggagagtcacatcaaatagtagatcagcccagagatatgtcacaatgcccctgtaagcagagtccaggcatgagactcaaatcacttttgtgctgggctcatcaatatgtcacaatgccttttgagagcaggaccaaatcaagagtaatatcaccttgtttgacctagtgatatgtcactatcttttgtttgcacaaaatataggaaaaagagacgagtcacatcagctgggtgctgaggccagagacatgtcaatctccccatcaacagaaatcacgtaggagaagagagtcaaaacacatgtatatgatgaggcgcggtcactcatgcctgtaatctgagcactttgggaggccaatgcaggtggatcaccagaggtcaggagtttgagaccagcctggccaacatgatgaaaccctgtctactaaaaatacaaaaattagtcaggcgtgatgataggcacctgtaatcccggctacctgggaggctgaggcatgagaattgcttgaacctgggaggtgcaggttgcagtgagccaaggtcatgccactgcactccagcctgggtaatagagtgagactctgtctcaaaacacacaccacacacacacagacatacagataaagggcacaaaaatatttaataatgtcccctataggaagggcccaggcagaagagtaaaatcacctgggtgttggactgtgcaatatgtcaaaatagccaatgtgggcaggcgatagccagaaatcacataaactgggtgcagggcctgtaaatatatcataatgtcttctatggagacagccaagacaggagaatagatcacatcagctaagtatggaaaaaaatgacatgtcataatctccactggagcatagactcaggcaagagggtcaaatcactcagattctgggcagagatacatcagaatcacacctacaggaaggtccagggacaggattaacagtcccacacatgtcccagttgttggtttggtctaagtatatgagtcacaatctcaaaaataaactggatctgtacaaaagagacttaactccttctgaagactgtttccccttagtgcagtcacagcctcacagatgtggggaatcttggtctgagattcaccaaccaacctagggacaagatccatgtatgagagttaattctccaactttccactgcctccaggtgggagattcagaacctcaacggtgggctgtgttcatgtggaaggatgacaatctttactattggccacctgtgcaaaagagtgtcataattttacctgtttgctgggctctgtgaggacagtctctctaccattcaggggctatatatgctatgtatgagagtcaacatctgctctgagaccttcatgctgttatgcacccatgattgtacctgtgccactaagtccacatatgagactcaacatctctcctattggctgagtctagatgggagagtcctgacctctctatgagctgggtttaggaatgagtcaccagcacagctgtggccaagtgttcacttatgacagtcagaattttaactgcagactgcgtctgcatgtgagattcagcatttcaccagtgggctctgtttagatgtgagggtgacaatcctaacagttggctgggtgagcatatgagaaacacaatctcgcttgtgttctgggccctgtgatgacatcttctctaccactggaggactttatataagatataagaaagtggtagttctctatgactttaatacacagaggagacccaggatcttacccatttcactaagtctagctatgaaagtatcttatattgactggttcgaggaaagagggtcagcaccctacctgtgagctgggccaagatatgtcataatcccacctataggtagagagtgagcaggagggttatatcaactgggagctggacaaggcatatatcacactcttccctgaggacaaagaccagctagaagagtcacatcccttcatgctaagtcagggatattttacaatgccttcctgaaagcagggaacacgatgcatactcacatcacctaggtgctgggcccagtgatatgtcacaatgctccctgtggacagtacccaggcaggaaagacacatcatctcaatggtgggcccagcaatatgtcccagtctttcctgtgggcagaatgccggcagaagaggagagtcacatatcctaggtgatggattcagggatatgtaaaaagttttctgttagcaagaccaaggcaggagccttaagtcccattgatgtagggcccagccatatgtctcaataccccaaatatgcaaggcccaggcaaataagacagtcacatcacctaggtgctcggtcaagggacatgccccaatcccctttttctgtcaggacccagacagaagaaaagagtcacaacacctaagtgatgaacaaaaagatgtcataatacccctgctggcagggcccaggtcgaagagttgcatcacttaggttttgatcccagccatatgtcacaacatagaatgtatgcagggccctggcagaagaggaggagagtcacaacacctaggttcttggccccgtgatacatcacaattccttcttgggcaaagtccaagcagtagaagagagtcacatcatcgtcatctagttgctgggtccagcaatatgtcacaataccccctaagaagagggcctaggcagaaaagtctcctcacctaggcaagaggcccagaggtatatcccaatgctttctgtgttagggctcaggaagaagaaagtcacaaagcctatgggatagaccaagttatattttacagtcaccctagtaagcatggttgaggcatgagtggagagtcacatgatgtaggtgctgagccaagtgatatgtcacaatgccctctgtgagcagtgaccaggcaggaggaagaagtcaaatcacctaggtgataagtgcagagagatgtaacaatattccaggcaagagagtaacatcaccttggtgttggattcagaaatatatcacaatgtcccacgtgagaaagatacaagcaagagagtcacaagaactgggtgcaagacctggcaatatatcataatttccactgtggacagactcaagaaacaaaaggagactcacatcatataggttatgggccccagagatatattccacttacctctattggcaaggaccaggcagaagtatcacaccacctttgcgctcagtaacgtactaggtcatatcacctaggtgataaacaacaatacatcgccgtttcttttctgaacatagctcaggcaagagaggggcattgcatttccaaggtgctgggcccagatgtatgtcaccatatcccttatgggcaaagatgtggtaaggggggatagtcaaatcaaatagttgatgggcccaaagatatgtcacaatgcactctatgggcagggtccaaacacaagacacacttcaccttggtgctggtaacagcaatatgtcacaaggccttctgaagacagtgccaaggcaaaagagtaacatcaccatggtgttgagcccagctttatgtcacaatctcccctgtgaggaaaacctcagaaggcaagagaagtcacatcagctcagtactgaacaaagtgatatgttccattctcccctgagagctaggatcaggcaaatgaagatactcacatcacttggtgacaggcccaggatatgaaacaattttctgtataggcagggcttaggcaggagagttaaatcaaatgggcataggacccagtggtatgttacaatgcctcccgtgggcagcgtcaaggcatgagagaagacatcacccgagtgcaaggcccagtggtgtcaaaatgtcccagcacccagttatatgttacaatgtcatatgtgagcggggtccaggcagtagagtcaaatcactcaggtgctggactgcggcatatgtaacaataacacctacaggaaggtccagagttgagattaacaatctcacacatgtcctggttctaggtatgagtcaatttctgtctggtcattctaagtacacaagtcacaatcccattggccaacaggatctatgtttgacagccctattccttctggggattgtgttttgtaagtagagtcacagcctcacgggtttgctgaatcttaatctgagtgtcatgaacccacttggggaacagattcatgtatgagagtcaaatttgcaacttttagcgacctcaggctgtgagattcagaacctcaacagtgagctgtgttcatgtgggacaatgacaatctttattctcacctgggtgtgcagatgagagttgcaatctcacttgtgtacggagccctgttagaacactctctgtaccactcgagggctttattcaacatgcatgagagtcaaaatttgctctgaaacctccatgttagaaaggatctttgatcatgcctgtggccctaagcccaggtgtgagagtcaacatctttcttattgactgtgtccggataggagagtcttcacctgcctataagttgggattaaaaatgagtaaccattccaattgtgccttgatgttcagatatgaaagttgcaatttaaactgtggactgactgcatttgtgtgtgagattcaaaacatcaccagtaggttctgtgaatgtgagagggtggaaattttaatggttggtggactgtgcacacgagaacacaatctcactcatgttctgggatttgtgatgacattgtagtacccgaatgctttatgtgatatgtgagactggcaactttctttctttctttttttttttttttgagacagagtctcactctgtcgcccaggcttgagtgcagtggtgcgatctcggctcagtgcaacctccgccccctgggttcaagcgattctcctgcctcagcctcccaagtagctgggattacaggcacctgccaccacacccagctaatttttgtatttttagtagagatggggtttcaccatcttggccagctggtcttgaactcctgacctcgtgatccacctgtctcagccacccaaagtgctgggattacaggtgtgagtcactgtgcccaggctgagagtggtaactttctataaccttcatacaaagaggagacacagggtcttactcatttttctaagccaaaatatgagagtcagtatctcttctgttggctggttcatctcacaaggtatgatggtcattattgcacctgtgagctgaaccaagatatatgtcacaatgccacctctcagtagggagcgagcaggagagccacatcacctaggcactaggccatggatatgtcacagtcttttctgaaaacagggaccaggctggagagtcacatcgttagcatgcttagccaaaaatatttaaaaatctcctgaaagcaatgcaacaggaacagaatcacctcacctggctgctgtgcccagcaattttgtcacaatgctctctctgggaaaatcccaggcaggagagacacatcaactggttgctgggtgcagaaatatgtcacagttttccttgttggcaaagttcaggcagagaaagattcacaattcttaggtcatggatgcagacgtatgtcacaaggctcactgcaggccaggcttaggcaggagcctcatgtacccgaggttctgggcctagtgatgtgtcatgatacccaaaatatgtggggcaaagcaaaaagaggagaattacatcatctagaatcagggtccagtgatatgtcacaattttttttttttggcagtgccctgatgaaagaagagtcacatcacctttgatctgggtccagtaatacatcacaatcccttcttggtcacagcccaagcagcagaagaaagtcaaatcacttaggtcctgggtttggaaatatgtccctatgaggagagggcccaggcaagagagtcaaatcactgaggtactgggcaaagaaatatgtcacgatcacacctgcagaaaagtccagggataaaattaacaatcatgcacatggcccagttctaggtataagagtcaacacattctgtatgttgggtctcagtacaagagttacaatctcaacagtggacaggatccttgcatgacagccacaatccctcccgtgcactgtattattttcaaagggtcacagcctcacaggtgtgctgaatcttggtcaggtgggttgctgactctccacataatgagaatcagttttccaactttcgactgcctcctggcatgagattcaggactttaacactggctgtgttcatgtggttggatgacagtctttatcattatctgggtgtgcatatgggtgtcacaatctcatttgtgtgcccggccctgtaaggaccctctctgtcttactgagggcattatgcagtatgcatgagagctgcaatctgttctgaaacttttgtgcttgtgtgaacccacaattttacctgtgattctaagcccagatatgagagtgaacatctttaataatggctgagtttagataggagggtcttcatctgcctatgagctgggtttagaaatgagtcaccattccaactgtagccaggtgttcacgtatgcagtcacaatttcaactatgaatggcatccacgagtttgattcaggacctcaccagtgggctctgtttatgtgtgacggtgacaaggctaatggttggctgggtgcgcatacaataagaaaaatttctgttgtgttctggatacactccctgtgtcacctgaatttatgctctccatatcacccaagggctttatacaatgtgagaggaagtggcgattttttatgatctttgtacaaagaggagacctggaatcttacctgttctctcagcctagctaggacagagagtgcctttttttactggctaatttgatatatggacctgccaataggggagattttgccttttttattttaggcttagggcagtggataaagtactgggtctcctatgtgaggaaaggtcacataagattatggacactcaagcttatcctataaagcttttgtgttacattgagagtataataacaggatccactacacaggtgagattgttactctcataggcacacctagctgaaaattaggattgtcaccctcacacataagaaaagcccactggtgaggtcctgaatctcacaggcacactccaaaattagatttgtgacagtcatatgtgggtcctgggacagttggtatgctgacttatttttgaagccagcttacagacactttgagatgactgtcatacctatatctggccaataagagagctgtgactctcacacttgggcatagggcaatgggtacaatcttaggttcatatcagcatgaaggtctcaaagtgaattgcaactgcctcttaaagcatataaagcctgtggataatacagagagtgtcataacacaaccaagaacacaggtgaaattgtgactctcctatgcacactcagccaacagtaaacattgtcactgtcacacatggaaactgtccactgttgaggctgtggatctcacacatgggggcagtcaaaagttggaattgtgactctcatacatggatctgcttaacaggtagaatggtgactcaaagactaggattcagaacacctgtgaggctgtgactcttagattcagaaatagttttcatttggaattggggctctcttgcagggagtgagtccaccattcagattgtgattcatgtacttggacccaactcaaatgaggtctcttgactctcatacctgaagtcagaaaatgtgtggaattttgaatctcatttctcaaccttcttgctagtgtgattgtgatatatacatttgcccagcacctgagtgatttgactctcctgcctgggtaaagcccaaaaataaaactgtgatgtatacctgggccaagcatttaagttattttactttcttgcataggccttgtcctcaggggaaattgtgacatatcactgggcccataacctaggttatataatcatcctctcctgcttgggccctgccaatacagatagttgtagcatataattgggccaatcacctaagtgatgtgactttactcttttgcatgggctttgccacagagtgggttgtgatatgtcactgagccctatgcgtaaatgatatgactctcctgccttggtccctccaaaaggaggcattgtgacctatcaataggcccaacaactgggtattgtgactctcctctcttacctgagccctgtacacagggtgacatattgctgtgccctgcatgcagataatgtgtctttcctgcatgaaccttgcccacagaaggcattgtgacatactcctgggcccagtacccaggttatgggacttctctgccatggccctccccacagagtggatagtgacatgtttttggtccagcattcaggtgacatgattctcttttctggtttattcacacaggctaagctttaacatatggtttttccagctcacaggcgttatgattacactcatataagaacccagacaataagaatgattttgaagctcttagactttaggcagtaggtaaagtcctgggtttcctacttttagaagggtcacagagatgtataaaatttatgcatatcctatatatactttgctacagagaatgtaataataggactcagcacacaagtgagattgtgattctcacaggcataccaagccaacaattgggattgtcaattccaaacatgaaaggtcactggtgagcttctgaacctcacacgcagatgcagtccacagtcaaaagtctgactgtcatgtgtacatctggaaacaggttgaatagtgactgatttctggacacagctcagaggcacagtgattagttgcatacctggacctagcaaacaggagatatgttgactctcatagggagccttcaagcaatgggcaaggtcctgggctttctacttgtatgaaggtcacagaggattacaaaactaatgcgtattgtatgatcccttcggtggtacagagagtgtcataagagattccagcacaaagttaaaattgtgattctcataggcatacccagcaaacagtgagaattgtcactcccacacgcggacagagaccactagtgaggtccagagcatcacatgtggatgccatccacagttgaaattttgactgtcatacgtggatctggccacaggtgggatagtgacttctttctgccgccaactcacaggcacagtgagaactctcatatctgacactagccaacaagagagatgttagctcttattcctgggcttacgacaatgggtaagatcatgagttcataacagcatgtagatctaagtgtggattgtgactttcaccagagaaagccctcaggtggcaccaagactgtgataacagggcccagtgcacaggtgagatagtgaccctcatatgcatgtccagttgacagtaagaattttcaccctcttaaatagccacagcctgttgttgaggttctgaatctcacacttggaggtagctaaaagttggaattgtgagtctcatacatgaatcaggtgaatacctgaatacagatgagataatgactcacagaccaagatttgtcacacctctgaggctgtgactactgccaggacacaatctgaaggttgaattgagactctcaggcacaaatccagcccagtatccagattctgacttgcacactaggactgaacacacaggaggtgttgactgtcctccctagagctggacatgtttgggattctgtatctcatccctggacttttctgcaggtgtgattgtgacatatgcttttgcccataccctgagtgattgtagttttcttcttgggcccagcccacagatgaaattgtgacatataccaaggccaaggaccaaggtaatatgactctcctcatctgcctgagcccattacttagaagtgatttttacatatttctgaattcaacacctaggtaatgtgactctcctcttgtgccaaagttttgatcacacagaaaattgtgacatatcactgggcccagcacctagatgatgtgcttgttctgccttaattctccccacatgggacattatgacatatttcttagtcaaacacctaggtgaagtaactcttctctcctgcctgggtctcagcttcagaagaacatgtgacatattgctgcacccagcacttaggtgatttgagtcctctgctgcctaatctttgcctacagtggggattgtgaactattgcttaacccagcacctaaattttgtgactcacttcttttgcaaagttctgctaacagtgggagttgtaacatattacaggaaccagcaaacaggtgacctgactgtcctctcttccctgggccctgcttatattgggcattgttacatattgctgggctcatcgcctaagcaatgttattgttctcttctgcttgggacctgcccacatgatggactgtggcatatcactaggcccagaacccagctgatatgactcttcttccctgatcctgctcatagtgaggactgacatattcctcttctagcatccaggtgatgtgactcttctgcctggtccctgtctgcatgtgggattgtgatatacatctgggctaaactcactggtgcaatgatgacaatcatacttgaacccagcaaataggagagatattgattctctttgctaggcttagggcaatgagtaaggtctgggtgtgtttcccgtacaaaggtcagagaaaattacaatactcatgcatattgtataaggctttcagttggtacagagagtatctaacagggctcagcacacagatgagactatgactctcaaatgcacacccagctgacagttaggattttaacttacacatgttaagatcacaaatgtcacatgtaaatgcagtttgcagttagaattgtgacttatatgtggatccagccacaggtgggatggtgactcacttccgaatccagccgacaggcacagtgatgattctcattcctggatgcagcaaattagagagagaggttgactctcatactgggcttagggcaacaggtaaaataggtcataccagcacaaaactctcagagcagactgtgactctcatgcatatcatataaagcctttgggtgatacagaaaatgtcataacggtgccaatcacacagggaagattgtgatccttaaatgcacactcacccaaaaataagagttgccactctcccacatggacacagctcacctttgaggttctgaatctgacatccagagacagttgacagttaaaatcatgactttcatacatggatcccatccacaggtggggtggtgacgcttggaccagaattcagcacacccatgggcctgttactctcacaccagaacacagcccctaggtggggctgggactctcatgcacggatccaatttactattgagatgatgagtcctgtacttgtgcgtaactcacaggaggtgttgactctcatacctaaagctgggacacgtgcagaattgtaaatctaaccactggaccttcttgcaggtgtgatttttatgtatacatttgccgagcccttgaggaattccacctgcctgggtaggccaagcctacagtgacattaattaaatcaagcatctaggtgacatactctccttcctgggcactgccctcaagggagattttgaaatatttctgggcccagcacataagtaatgggattctttactcccgcctggttcctgcacactgggagcattataacatatcactgggcccaacacctaggtaatatgactctcttctcacgtctgggccctgcccattttaggaattgtgacatagcactgggcctagcacccaggtgaagtaaatatccttttccatttgggttctgcatacagggggcatgataatataatgcagtgcccatcattaaggtgatgtgactttacttcatgggcaatgtccacagggagcattgtgacatatctctggacccagcacctagatgatgtgactccctcctgcctaggccctgcatatagggggaattatgacatattgctgagtctagcacctgggtgatgtgactcttctgcctgagccctgctcacagggggcattttgacataactttgggttcatcacctagatgatatgactcacttcttctgcctgtgctttgcccacaggaaaacctggaccatatcactgggctgagcacccagataacgtgactgtctttcctgggccttgcccacagggggcattgtgacatttcactgggcacagcgctgaggcgatgtgactctcttgcctgggtcctgcccgtagaggaaattgtgacatattcctggtccagcacccagggaatgtgatgatccagcctcatccctgcagccaacagggatgaagatgactcttaagcctgaactcagctaataggagagatggtatctttcatagccaagattagggcaaacaataaagtccttagtttcctaattgtataaagatcacaaaggatcacatcacccacgcatactatataaagcacttgagtagtacagagagtatcataacagggctcagcacacagttgagattgtgactctcatatgcacacccaggccacagttataactgtcactctctcacatggacagagcctgctggtaaaattctaagcctgaattgcgaacacagtccacagttggaattgtgattcatatgtgaatatggccacagttccaatggtgactcacttatggactcagatcacaggaatggtgataactctcatacctggatccagccaataagagatgttcaatctcctacctgattctagggcaatgagtaagatcaaggatccatacaaccatgaaggtctcagagcagattgcgactctcaggtgtagggatatatatatatatatatatatatatatatatatatatatatgcacacacacacacatatatatacacacatatatatgtatatatatacacacatatatatgtatatatatacacacacatatatatgtatatacacacacacacacacacacacacacacatatatatatatatatatatatatatttttttttttttttgagatggagtctctctctgtctcccaggctggagtgcagtggcgtgaccttggctcactgcaagctccacctcccgggttcacgtcattctcctgcctctgcctcccgagtagctgggactacaggtgcccgccaccacggctggctaatttttttgtatttttttagtagagacggtgtttcaccgtgttagccagggtggtctcgatttcctgacctcgtgatctgctcacctcagcctcccaaagtgctgggattacaggagtgagccaccacacccagccctcaggtgtatattttaaagccctcaagttgtacagtgtgtcataataggacccagcacactgatgagattgtgactcttgcatgcacacccagctgacagtaagaatcgtcatcttcccacttgaatacagcacactgttgaagtcctaaatctcatagctggaggcagtcaaaatttggaattgtgtctcagacaagaatccagtccacaagtgagataatgactctctgacctggatttagcagccctgtgaggctgcgagttccctactgggatatagtctgctggtgagattgaggtcccatgcacatgcccagtccaccgttgagtttgtgactcatgtacgaggacccaacacacagatgttgaatctcatacctagagctgggacatataaaggtttgtcaatctcatccctggaccttcccacgaatgtgattatgacaaattcgtttgcccagccccttagcaatttgactttcctgcctgggcccaggccaaaactggaattgtgacatatacctgggccaaacacctaaatgctgtgactttcttcttttgcctgggatctgcaaacagaaaagattgtgacatattgctaagcccagcatttaggcgatatgactcttcctccagggacatggtgacatattcttccccagaatatgggacattgtgacattcctccctgttcctacagggacattgtgacatatccctgggaacattaactagattaagggactcccctctcatccctgggtcattccctcaggggggattatgacatatcactgaatccagaacctaggtgattttttttttctcctctactgcctggaccccatccacaagatgaatggtaacatattgctgagcccagcaaccagatgatgtcactttcctctcctgcctggaatctgctcagaggtggagagttacatatcactgggcccagcacataggaaatgtgactctcccctcctgtttgggccctcccaacagtgggaaatgtgagatgtcactgggctcatcacctagatgatgtaatgcttcttccctttattgatccacccacagtgggaattgtgacatattaccatgatcaacagctaaatgatgtgactcttttctgctgattgagccctgcttatagggggcattgtgacatttagcttcaccttgaacccagatgatttaactctcttatctgggctttgcctatggagaacactgtgacatatctctgcaccgatcatctaggtgaagtgactctcctctcctgtctggttctggctcaaagaagggaatgtaacatgtcactggacccagcacctaggtaatgtatcgctattttctcttaggccctgctttcatggtaaattttgacatatatttggatgtatcacctagatgatgtaactctcttttcatgcctgggcaatgcccaaggggagattgtgacatgttgctgagcccaggacccaggtgatgttagtctcctgcctggccttgcccgcctacaaaaggcattgtgatacatctttgtgctcatcacccaaataatgggagtctttttacctgccagagccctgttcttagggaaaactgtgacatattactgtatctggcatgtaggtgaggtgactcttctgcctatgcattgcccacaggaagaattgtgacatatcactgaacccagaacctaggtgatgtgacttttttcctgtgccttacatgcaaaaaaataaaaaatatcactgggccccagaactaggcgaggtgactcttctctactacctgggtgaaccccttataggggcattgtgacatatctctggccccatcacctgggtgaagtgactatgctcttggctgaataggtgctgcccacagctgtgattgttacaaaatgctgggcccagcactcaagtggtttgactctgctgcatgggccctgcccacagagggcattgtgatatatgtgtgggcccatcaactaaaattgtgactttctacattagtctgttctcatactgtgaataaagtcatcctcaagactgggtaatttataaaagaaataggtttaatggactcacagttccacatggctaaggaggcctcagaatcatggtaaaagataaaggaagagcaaaaggcatcttacatggtggcaggcataagggcaggggaactcccttttataaaaccattagatcccacgagacttattcactaccccaagaagaatataggagaaccacctccgtaattcaattatatttacctgtccttgctcttaacatacagggattgttaaaatttaaggtgagatttgggtggggacacagccaaaccatatcagtgttttctcctgcctggcccctgtccataggggagattttgacatatcactgaacccaacaccttggtgatgtgacgctcctggtccctgccataaaagagaatggtgacatgtcactgggctcagtacctaggtgatgtgactcttctctcctgtctggactctgtcctaaaagagaattgtaagatatcactgagactagcccttaggtaatgtgattttcagctcctaccagggccctgtctacaaggggcaaggtgacacagtgtggggactatctcccaggtgatgtgactcttctgcattggcctggcctaaaggggaaattgtgacatatctctgggcctaccacctagctgatgtgaccttcctcacctgcttgtgctctgcccacaggaagatttccacgtatatctgcgtccagcacctaggtaatgggactcttctgcctaagcactgcttacacaagccattgtgatgtattcctaggcccaagacacaatgatgtgacttttcactcctgcttggcactgtgatatatcatggggctcatcacctagatgatgtaattcttcttttgcttgggccttgcccacaaaataaatagtgacatattgctgggcatagcacctaggtgatgtgatacatctgctctggcctgtaccacaaagggcactgtgacatgttcctgaatttagtgctcaggagatgtgaccctggggccagagctgagtccacaggtggattgtgacgtattccttgcccagaacctaggtgacatgactctttcttcctgcatgggccctgacttctgtgagggttttgacaatattactgggccctacacccaaatgatgtgactctgctgcctgagttctgtcaaaggagggattgtgacctatccagtaggccagaacctacatgactttcctctccttcctgagccctaaacagaattaattgtgaaatattgctttacacagaacccaggtgatgtggttctctaggctaggccctgcccacagaggcattttgacatatggctgagctcagcactcaagtaatgtgactttcttgccagggccctgaacacagggggttattgaaatattcctagaccaacattcaaacaatgtgactctcctgtctggtcttcccacaggtgggattgtgacatacctaggcctagctcacaggcgtgatgatgactctcatatgtggacccaacaaacagaaaagattttgactctcatggctagaattaggggaataggtaaggtcttctgtttcctacttgtggtaatgtcacagaagatgatgacactcatgcatatcccataacatccttgagtgacacagagagtgtcctaacaggactcagcacacaggtgagattgtgcatcccacaggcacacccacctgacaattacaattgtcactctcacacatggacagaacccactgttgaggtcctgaatctcacatgtggacatgatccacagttagagttgtgactgtcctatgtaaattcagcaatgtgtgagatgatgacttatttctggatcaagctcacagatgcaatgatgactctcatatacttggatttagccaatagaagaggtgttgattcttgtagctgggcttagggcaatgggtaaggtcctgagtcttctacttgcagaaagttctcagaagattaccacactcatgcatataatataaagcccttacgtttcaccaagagtttcatattaggtcccagtacaaagttgagattgtgactcttctatgcacacccagctgacgggattatcaccctcacacatggacagagcccactgctgaggttctgagtctcacttgtggatatagctcacagtttgtattgtgacttttatatgtggatcttgccacaggtgggtgtcttatttctggactcagctcacagacacagtgatgactctcatacctggacccagcaaagaggagacatgttgaatcttgtattaggatgtttgtgtgtgtgtgtctgtgtgtgtgtgttttagttccttgagctttggaaattgattctacagtatcttatacagatgtaaatgtatcaggctttttttgtaaagctatatatatatattcctcctgtttattaaaatattgtcattggtgttatgtagatatagttgtagacctcaaaacagaaaataatattgtaaatattatagcttaataaatgtttatggtatctaaataaaaaatgtaaattatacatatttggaaggtagttatttacaattgcttagagcttacctggtcagccaaggcctgccttcaattgcacctgcttggttacagtatctcctggggtgaaatggccctcactgagaatggtcaaaataagaaaaaaattttggcagataaatcttacgtgtaaagaaacagagatgtggaaaaaaatgttcagagaaggataaataaatcaattttaccacagttatttttaagacagtaaatgctttaggccaggtgcagtgactcactcctgtaatcccagcactttgagaggccgagttggcagatcacgaggtcgggagttcgagaccagactggcctgcatggtgaaaccccgtctctactaaatacacaaaaaattagctgaggatggtggcacgtgcctgtaatcccagctacttgggaggctgaggcaagagaattgcttgaacccgggaggcagaggttgcagtgagccgagatcacaccattgcactccagcctgggggacagagtgagactccatctcaaaaaaaataaaaataaaaataaataaacagattcttcaaagtcaaataaaatttatttaattaaaaattgcagacactgggtgcggtggctcatgcctgtaatctcagcactttgggaggccaaggtgggtggatcatgaggtcaggagtttgagaccagcctggccaacatggagaaaccctgtctctactaaagatacaaaaaattagccgggcgtgttggcaggcacctgtaatcacagctatttgggaggctgaggcagaagaatcacttgaaaccagaaggcagaggttgcagtgagccaagaccatgccattgcactccagcctgggcaacagggcaagactccatctcaaaaaataaaataaaataattgcaaattggagtgagccgagatcatgccactgcaatccatcctgggtaacaagagtgaaattctgtctcaaaaaaataaaaataaaaataaataaagtgcaagacggcctatagaagcactgaaaaatctggaaaattagcaaaatgttcatgaacagttgaataaataaattgtagtgtatttatatgatgtcatattgtagatcaataaatatgcaaaccacaagcagcaaaattcagatagtggtcactttcgggaagtaggcttatagaagactttagaggtatgtactttatgagagtatgtgaggattatatgaagccagactgaaagtttcctgagagtagagaccaaaactttctttttattttttgagatggagtctcactctgctgcccaggatacaggtatctgggcccagctaatttttgtatttttagtagagacagggtttcactatgttggccaagctggtctcgaactcctgacctcatgatctgcccacctcggcctcccaaagtgctgggattacaggcatgagccaccacgccaggccaatactttcttttcttaattttatctcccaaggctagcaaaaagcatagcacaacgtgtatgctcaatgcacatttattggttaaatgaataaatacataccctttgtaaactgtcaagccctatgcaaatcaagaatttatttttattacttactacagtttagttaatagaatcatataaaaggtaatcaaagttaagattcagaaagcactattcaaaatttaatgttaccccagcattcttaggcaaaataaagtaaaatttatagtttctaaatttgtgaccattataattacatttaaatttccatgtgaggctggaacataaaatcttccatcaggtgagcataatttgagagaaaaatacatttaaaaataaagaaaaaacaggaaaaagaatgaaaacttggttgggttagatctgcaagttctattccatacttctttttttttttttttttttgaaatagcttcccatactcctggtgcagagggaggctgaggagcctgggtccctctgtccttccactgtggcagtggctgatctctgctcaggcatgagaagtgctgccctgtgctgggtctgaggctgccctgcccagcccctcctcactcccttggactcttcacagtgtctccaggctcctgtgccatcctgagcatccctttgatggaaagggaggtggcagcaggaagccagtaggaggaactggccctgcagaccgagagatcttgtccaggaaatgctctggttggccttggcttttggtgcatggagctggacatcaaccctgggttgtagctaaggtgtccctgggctaggtgaccctgggcatggatgctccagttgctgctgccattcctgctgtgctcagctgggccgcagctggaaccattgccagtcagaggtgcaggagcagccctccaggtgggaggaggccatagccatgcatggttcctggaaaccaggccctgctgacaaatcttagatgccaggaacagaagaaccaggagaaactgcctagagcttgaggcaaatggatggactgttggaatggctgagggtgaagctgcccaaaatcctcaaagtggagtagcaaagcaagcatcagagatggacaagaaaaataaaagtcaaaaaaattagcagaaactgtagcaggatgagccgcagacaagaacccctcagacaccaagttgtggaaggaaagggctttattgagctggtagcatcagcagactcacgtctccaaaaactgagctccccgagcgagcaattactgttccttttaagggcttacaactctaaaggggtccacgtgagagggtcgtgatcgactgagccagcagggggtacctgactgtgggctgcatgtaccggttattagaacagaacagaacaggacagggattttcacaatgtttttccatacaatgtctggaatctatagataacataattggttaggtcaggggtcgatctttaactaccaggcacagggcatggtgctgggctgcctgcctttgggtttcatttctgctttttagtttttacttcttctttctttggaggcagaaattgggcataagacaatatgaggggtggtctcctcccttattcccccactttgagaacctcactcattagtgggagttctcactttcatcctcactacccatgtcttcttgcaagacagattgatagtgattcatatagtacacttgtgctgaagcattttgatgcactaaagtagtaacaaaacttttcattacttgaaggagcaaaggcagcacacagggaagcaacatgcaggtttctattactattataattcctattatagtagttttaaatcctcctagtgctggaaaccattttccaaacatggacctaggattaaacccatgccacacctgcatgggaacatgtgccagctttgttattttaattatatcttcaactatttgcccttggtcatctatgtgcagacagcaattggtcatgttaaactttccacagatccctccttcagctgctagcaagtagtctagggctagtctacttttatagatagcatttctcatctggatttcttgcagggctaaaacagttaaagctctgccagttttattagtgattatttccaagacagcttgtaactgtgtgattcggttgagcatataaatgggggttcagtatccctacgagccatcttgtgcccaagtggcaggcccatagtactgtatgattctttcaggggaccacttgtcatcttcccagtcgcctatagctatccttctcttttctcggggagcatagacatgacagcctaggagcttgcctgtttttatgggcagtaggaaaaaggacagtttaatggtgccaataacacaactacctgcccattggtcaggtaacttggcataagctctatgcccacatattcggtataattcagaggaggctgtccagacctgatgggactccgggtgtctccatacagtttgcaactttggaaatttgctaaacggatttctttcagtgtggtttgaactccaccaggtggctgcttttgtagtgtacagtttttgcccaaggcagctgtcttcccacaggaagggtgaagtccttcctcacccgtgctatacagtattgtctaataattgaggtttttcagaacccagaagttgccagtctttaatcttattttaaaaatggtagtcatagggggcttagatgggttatagcacacatcaggctggtcacttcctgggctacataccctgtatagcattatacaaataagttcctcttagagtcccggtacacttacaataaccataaaataatagggctgtagtaaccttttgtcttacctcagtgacttgatgtatatgtagggaacagtcctcagtctgaggaaggtcagttgaagtccttactgtacaagtccaaattttaaggaaaatgagtcccaaaatgagtttcctcatgctttggccatgtgtggatcagtcagcttctgggtatgactggatcagggcttgtagtcttctgaatcactttgcaagggttggtgaagctgctcccatccatgtacccagtctactgatgtttaaggatggtcttggaggttgggcctgctagaataaactgagtccaacacctctacacagttatgttcaactgcgctctctgatactgggagcaaagtggcggggttcagagtgttgcaatcttcaatggttatgcgggaattttcacagagcaagctttggtatttagttagcctagcatttgttagccaatgatggcctttggtatttattaaagtcactacagcatggggggcctttatgtttaggttttgcatacgagttagcttacccacttcctgtgctagctgggctgttgctgccaaggccctcaaacatgggggccaaccctaagaaaccccatctagttgtttagagaggtaggccacgagcctcggccaggaccccacagtctgggccaaaattctaactgctaatttttgtctctctctgacacatatagtgtaaaaggttttgtcaggtcaggtagccccagggctagggccaacatgagtttttctttttaactcatgaaaagcttgctgctgttggttgtaatagatgtagtttatccaatctacatttttattaactgtcactcaccaaaatattcactcaaatcctgcagctatttgattttgggctttaaattgacctggtgttccctgtgggactccaattgtgtctaaatagacgtgagcatcagaagacccataaggggcttctcccactttatgatgttttatttttcctccctctcgttgatgaaatgccagggtgaaagggatagccaattggactaaagcacaagtgccactccagttatttggcagagtgcccaataaagatccaccacaataccaccacacatccaccagggatgaacaagggctgactgattgataaactcttgaaaaaaaattttttttgaaatggagtctcactctgtcacccaggctggagtgcagtggtgcgatcttggttcactgcaacctctgcctcccgggttcaagctattctcctgcctcagcctcccgagtagctgggactacaggtgcctgccaccatgcccggctaatttttgtatttttagtagagatggggtttcaacatgttggccaggctggtctcaaactcctgaccttgtgatctgcccaccttggcctcccaaagtgctgggattacaggcgtgagccactgcgcccggcccagctcttgaaaattcttaagctcactgcatcccttcaggtctccaaggaacactgtttcctccctgtcctgagagacacgaagtgaacttagtgttggaaaatggaggctggatggccctcaggggctgacccgcaaggtgctgtatttcgggatatagcagagagagagcttggcatgactttttaccctaggctgtagaatcttggaaaagagctacaatgtaacccaggcccatttgactggaggaccaccctagtggaaaggggacaatctgggcctctggcctgccatgtgctcaagcataacaattgcttttgtttaatgtgcggatggaatatttgatccactccaaccaggcatttacatcttggtatcctgtcttaattgccaaagtttgttttaggtttttaacttctatgatcctctagtaaaatgaatgtatgattttaggaaattacaaaaatggttggggcagtccacacttgctctttagtggtccacagaatgttggatcaactatggcataaaagctctacattggggggcaagaatcgtggttgacactggggtctttatcaaaatctccgtggattaaatggtcctaatttactaatgcccagtctgaggagagtcaggagggacagaggtacttttctgaagtagagagctgtctttgacttggcaagtccccacagggtataacaaggcaagcattaagtgcaacagtttgaggcaaaattgacttggttatgttaataactagatgatcagcaatagagcaaggaaagaagaaagagtaataggatagatgaaagagagttaaatttttcttagctttagtttggtaggggtttcccctgggactatggcccacgactctggagggggtggcactttcttgactcaggtatgatgagtccatcccctttttgctgtatgaacaacagtctcagtggttagcagcacaaggtagagcccttcccaggctggctcaagtttttcttctttccaccctttgataagaacatgatcttcaggctggagctggtttaccaaaaattctaggggtggtacatgtgctaaaccaagtatataatttttaagaaactgaccttttgttttaaatgtgaggacatcagcagtggattttatagtccttggtgcctttttactgagaaatttcctttagcgcctatttttattagtttttagaccaaagaaagccaaacaccattttatatttgacaatgcttcttgtatgatttttataccagataagctaaatttcacatttatattcgtgtgttattaatgttaaacttagttttaataaaactttgtagacatatttatccaatttttaatttctgaccataaggtaagatttttatagactctttttaaccttttataatttttgttaaacagcagattagtgctttaagaaaaacctgttgtgtttttattttaatgttccgttcacagaaaaactggatgatacccttttaactttagccaatatgtttacacacagaatttcctttacaattaacattttaaaacctgcttaaaccttcaaaacaaatttttttaaccttttcatgtaggtaaaaatccacattcttatgcctccttataatccttttaccagaggtgtattttactttccttatacaccttgcacataaactgtatttttcaatagttttacattcaggaggcctagttacttttaaattatacatttattgcataaattctttttttaaaacatttttttcacaactttcacagacaattctttgacatgtctcaactttctgacttattacaaacatttctttctttaagcaaccagttcatttatttcaggacaagaatttaccatataacattctttttacaaaaattctgctgcctattttttttccctttttgttttttctaagataaccattcttttccaaagcgaacttcctttatgtctgtggactagactaaggccacaagattagaagttactataatacatgttacactgttaacttttagcaaagtttacttttgttgaaaaccttgtaagtttgggatttccattatcctttgctattaataagaccttgtttagtccaaattaacttagaattggtatagatggctgtttttgtttgtttacccaggaggaaccatctatcaacctgtcctgaagggagttcctcctaggtctggtcggacctttgtatggtaattaagatttagatcccccattaggggattttcagtggttaatgttgtcatcttttttttttttttttaacagaatagccctatactttaagatttttaagttagtaagctaccttcttgctttttttttttttccttagggtacttctgaaccagtggggagtgctcacaatgaggttttctctaaaagttatttttctactttcttctgttagcaaagcagttgccactacagattaaatgcatgtaggccatctgcagattactaggttaaggatttttgataggaaggctacagcttgtcagtggcctcagtgctttcaggctatgcccttgtttacagtcacaacaaggtggtattggagagttgtagggtcatggagaagaccttcaattatcaattataggttttaaatttatcctggaatagagtacactttttttcttaactacttgtatatctctctttctctctttgattttctctctctttgactttcctttcacctctgtctctttctctctgcctctctttttttctctctctccttgactccaactttgtctctctgtctcttcctctctctctttgcctcttttcctctctgtctcttttttttctctctctctctctctctgctggtctttccttgcctctgccagccgcttatgctgctgttctctcaaccactgtgggaggggtggggggagtctaaaaccagctgtgacgaagtgtctatgtatgggaactggtctcggtgacctggctgacaggttaccttgtgacatacctctgaaacaagggacctctcaaggcttccttctgatggccaacccacctctaatgctggccagtctaagttacacaaagttttaagttttcctggtgtcatagtattccatagtctcctttaaatcctttcttgaaatttttcaacataattcctagtggggtgggcttactttgtgcctgatccatgcttccttgagacaaaacacctgctcacaccacacacacaccacaaaacaagaacaggtaaaaagggcacacacacacttttacagtttacaccaaaccagaatcaaaaccaaaatcagagtatcaggaaatccaatccaggtcaaaaccaaaaccaaagtatcaagcaatccaagtcaagtcaaaaacaaaaaccaaagtgctggtacaggcacaccatgggtgatcaggccatgcttccactcaaatggagtgggcaagttccaaagaccagtcttaccaaatttcatatgtccagactccaagtgccaattccttcctggtgttcagccactgtgttgatcctccgtgagggcctgccacatgcttctctagtaagatgtcccaccggggcaattgcctacctgggagcactctttggatctgcgtcactcaggctgattggagtcccccacagggatgctccacagggcaggcctcagtcacctaaggggctgcctcgacagtccaccaatcacctcacttcctggtcagagaaccaagaaatgtagcaggatgagccacagaaaagaacccctcagacactgagttgtggaaggaaagggctttactttattcagctgggagcatcggtggactcatatctccaaaaaccgagctccccgagtgagcaattactgtcccttttaagggcttacagctctaagggggtccaggtgagagggtcgtgattgattgagcaagcagggggtatgtgactgagggctgcatgcactggtaatcagaacaacagaacaggacagggattttcacagtgcttttccatacaatgtctggaatctatagataacataatcgattaggtcaggggccgatctttaactaccaggtccagggcacagtgccgggctgtctgcctgtggatttcatttcttccttttagtttttatttcttcttctatctttggaggcagaaattgggcataagacaatatgaggggtggtctcctcccttaaaaccaaaggcagatgctaaagcagtgcaaaactgttcatgtcacaatggaaacggagttgatgaaggagtctgggaaacgaatcttagtcacagcaagaaaggacataagtgaacatggcaaggtgctgacaattctggtctactggatcccaccatccctaggacagtcaccacccagcaagctacaactgcatcatttcctgtttgttccaaaatgaataaaggtgattcttatcacaagggcaaataaaaagtcattttttttttttttgagatggagtctctctcagtcacccaggctagagaacagtggtgcaatgttggctcactgcaagctctgcctcctgggttcacaccattctcgtgcctcagcctcctgagtagctgggattacaggcatctgccaccacgtccagctaatctttttgtatttttagtagagatggggtttcactgtgttagccaggatggtcttgatctcctgacctcgtgatccacccaccttggccttccaaagtgctgggattacaggtatgagccaccgtgcccagccaaaagtcattttttaaaactaaactgtcatggttttgtttactttttgaaagttcttataattttgaaagttcagttgacacttgtatgatttaggaagttttcaatagtcttacagtacttgaattgttcaaagtacagtatattttaaattaagaagagtaaactgtatgtgttatacatatttaaggctcagactcacaaataatgctcctgtttatgatttgaaaactttgaagtttggttttccatctgtacatacacagaacagtgtagcgtgcaaaaacatttgttctttaaagaggcagccacactttttgtctgtctggatatattttggactttgtatattaaatgtaacataaaaccgttcattttgttttagaaaatctaagattgatgtacacaaactttagaaattactgtagcaatcagcaaaccatgtatataatgtgaaactaatatatctatttttgatgtctaaatctttttgtagaaaaaattggtttctttaaaaatgtctccacaaactcaggcttattttataaaatggcaaaatagtaaagaaatgggtggtttggcatactatatgaatactggcactcaattaaaatacagaatatttttatcaaaattatttagaaagtagatttaaataatttggtttttcacttcagtgatagacattcacaaacatttaaaaaatcaaatctggctggatgcagtggctcacacctataatcccagcactttgggaggctgaggcagatggatcatgaggttaggagtttgagaccagtctggccaacatggtgaaaccccatctctactgaaaatacaaaaaattagccaggcatggtgacaggcacctgtaatcccagctactcaggaggctgaggcaggagaattgcttgaacctgggaagtggaggttgcagtgagccaagactgcaccactgcactccagcttgggcaacagagtgagactctatctcaaaaaaaccccgcaaatctattagtattaggtttgatttagtgttgatatatacataagatcaaaaatctgttaaaaataaatatttttcatcgctaatttggtgtgtttttttgtttgttgttttgttttgtttttgagatggagtctcactctgtcgcccaggctggagtgcagtggcttgatcttggctcactgcaagctctgcctcccaggttcacgccattctcctgcctcagcctcctgagtagctgggactacaggcgcctgccaccacgcccagcttatttttttgtatttttttagtagggacggggtttcaccgtgttagccaggctggtctcgatctcctgacctcgtgatctgcctgccttggcctcccaaagtgctgggattacaggcgtgagccaccacgcctggcctaatttggtgtttttaaatacccagatgtcccattttaatcagattaagtctggggaaagttgactaatcttatttaattttttgtacagtatgttcaaaatgttctggtttaacctaatagcaattaatgatgagtaaacaatttttctttcaaatctcaggcctgttaaattgctgaagctatttttaatttaaaaattttgggccgagcctggtggctcccgcctgtaatcccagcactttgggaggccaaggcaggtggatcacttgaggtcaggagttcaagagcagcctggccaacatggtggaaccctgactctactaaaaatacaaaaaattagccaggcatggtagcatgtgcctgtaatcccagctactcgagagtctgaggcacaagaattgcttgaactcaggaggtggaggttgcagtgagccgagattgtgccactggactccaggctgggcgacagagcaagactctgtctcaaaaaaaaaaaaaaaagtctttaatgttgtttaaagggacttaggtctactctaatcttctcaacctgttaatcagtgtcaggtgccaaattccaatttattttcagggtgcctgaatgacttttctttgcatagtctttgaattaaatttccattaataaggacagatttcagtacatttaaccagttgcttttagtacctccaaaggtagtatacaaagaattctcatgttattttctaagaaaacagattctactgttacctgagaaatcaactggaaggcatttttataaccttgcaccacataaaaaaatgcaatgtagtactaataaatgcaggctacatcacacaaaaaatggtaatcaagaataccactttcaatatttaaatatttgaaattttggtaaaaagtgtggtaaagtataacttttagtaagctttgtgcagctaaacatcagcataaagtaggaaaagatctttaaaaatgaaaacaaatgaaaaccgacaccaaaaaaactaacatccaccattgcatacatattgatctctgtttcaaaaaagtctgaagcagaacgtttggtgaacttcatgcagttattttcactacactggaatactgataaaatcatttatatttaatttgagtaaagcatgttcacatcttaaaaacactgctttgtagctgggcgtggtggctcacatctgtaatcccagcactttgggaggctgaggtgggcagattacgaggtcaagagttcaagaccattctggccaacatggtgaaacccatctctactaaaaatgcagaaattagtcatgtgcggtggcttgtgcctgtagtcccagctactcaggaggctgagtcaggagaatcgcttgaacccaggaggtggaggttgcagtgagccaagatctcaccactgcactccagcctgggtgacagagtgagaccccatattaaaaaaagatactgctttgtactatgaataataaatgtaaaatctttttatttacttatttatttttaatttattttgagacattcttgctctgtagcccaggctggagtgcagtggcagtgatctcggctcactgcaacctctgcctcagcctccccagcagctgggactacaggcacacaccaccacacccggctaatttttgtatttttagtagagacgggtttcaccatgttggtcaggttggtgtcaaactcctgacctcctaatccacctgcctcagcctcccaaagtgctggaattacaggtgtgagccatcgcgcctggctataaagtctttatactcaagagaatcctgattctcaactcaacatatatgggcaaccctttcctctggtgtctttaaacggaagcctcattaaggctcaaatatggagtgaaagggactcaataacagcatttgaagcaaaaaggatgaggtaggatggtcagctctgaggctcagggattgcctgggggactccagtatgatgtaactatgaagcttactgcatacaagtaaacattaacagccgaaaacaccatggcttgaaattggtgagatagaatctctgaaatcataaacagttgcaccaaaaagattgacccagagtgacaagtaactaaggattactaagggggagtgtttacaagcacgtaagtttttgttccaaatcttattacagtagcaatatgcttttctgtaatgtcagcttccccaagctacagatgctatagacaaactacaagtgcctaatatgttgtttgcagtcagtgtcttaatttagaaaactttcaataatttcatgaatttcattgaaatctgtttcatgtataaatctcactgaaaggcattattcagtagctatttccctcagtattttggggaattttctattgcttgatttcaaaccaactttacttgaatcctagtcatttctaaagccccagatgtaatagcagaaagacagcagaaatgatgccaagttactccaaacagttcacgtctaatatatttggttccccaaatgaaccagaaaccacacaagctaaacaacagtgtatttgaaattcaacctaaattcaacagtaacagtcaaaaccctatgcaaatatcagcacagtcacaatgtagaaacccttagtcttttattccagagaaaataaaaaaattcttactttggcattttctggaaaggataaatacattaaacatgacaaaatataccaactcacataatatatttgaaatgtgaatatttattcttaaatatttactgtaatatttaaacaagactttcagtgaaaaatacagctaccatgtgttaaaacagccctgagtgagatagtattttttattaataatgaagattgaagcttcagaaatgcaaaataaataatcctgggcacacagctagaggaaggtaacttaaagtatttgaaagatgttctctaagactctaaaattattttgttttagcttatataaaaaatgattaagcatttttaattttcaaaaaatgtaagtgcattctgtcaggtttttctgaagaatttaaatagaatagagtaaaattatacttatcaaaaggtaaacttttctattaatagagcagtttaattttcacaccctgagtaaaatcttacaaaatttattgcaatttaatcagaaacttctttctcacactgggagagatgacacaaagatgcagctttcatgttgggtgagagaagaaatgatcaccggaggtagataattgttgtttcactaatcaatgttgatttttattgctattttgtctcaaattatgttaataatgaagtaatggccttgatccaagaattttttttttttttttttgagatggagtctcactctgtcgcccaagctggagtgcagtagcgcgatctcggttcactgcaaactccacctcccgggttcaagcgattctcctgcctcagcctccctagtagctgggactacacgtgcatgctaccacgcccggctaattttctgtatttttagtagagacagggtttcaccatgttagccaacatggtctcaatctcccgacctcgtgatccaccggcctcggcttcccaaagtgctggattacaggcgtgagctaccgcgcccggcccccaagaacttttttaacaatttatttttaaaattagccaaaatattatccataaggcagaaaaatgaagatattaacagtcataatttgtattttaaattaaaatacttttagaaataaaaaagaaaaaatatataaaaacaaatgaaagagaaggaagtaggttactcacaatagctaagatagagaatcaacctaagtgtccatcaacaggtgaatggatgaagaaaatttcgtgtatttacacaatggactgctattcagcccttaaaaataaagaaatcttgttatttgcaacaacgttgatgaatctggaggacattaggctaagtaaaaagagccggcacaaagaaaaaagggaaacaaaaacataccacatgatctcgttttttttttctcaaaaaagtttcaattttatttagctttgtgactttgtacttgtgccttcaacactttcacaacgattttctgctccccgataaggaaagcacgcttgatcctgccacgaacacatttagcacacatggaaccaccataggccctgctgacatgtttctttctttttgacaatttcataagaactttaggtcttacagcacgaacccctcgaagtcttcctgggcacatgccacttgcagatcttggtgctttcccaaccttcttggtataaaggtaaacaattctattaccaggggttcggggcagtctagttttgttggacgctgtattgtaggaaagcctacattggtatgtcaaacgctggaccattctgagtgcctacagacaacgtcactggaagagccacatgatctcatttctctgtaaagtagaaaaaaattctaattcggccgggcgcagtggctcacctgtaatcccagcactttgggaggctgaggtgggtggatcgcctgaggtcaggagttcaagaacagtctggccaacatggtgaaaccccgtctctactaaaaatacaaaaattagctgggcggggtggtgggcgcctgtagttccagctacttgggaggctgaggcaggagaatcccttgaaccagggaggcggaggttgtggtgagccgagatcactcaattgcactccagcctgggcaacagagcgaaactctgtccccccgccccgccctcctcccgcctcaaaaaaaggccgggcatggtggctcacgactgtaatcccagaactttgggaagccaaggcgggcagatcacctgaggttgggggttcgagaccagcctgaccaacatggagaaaccccatctcttctaaaaatacaaaattagccaggcgtggtggcgcatgactcccagctactcgggaggctgaggcagaatagcttgaacccaggaggcagaggttgccgtgagcagagatcaccccattgcactccagcctgggtgagcagagcaaaactccgtcttgaaaaataaaaaaaaaaatttaactcatagaagcagagaatagaatgatgattggctgggggtggagatattggtcaaaggtaatgggtctttcctatatctcttactttaataaataagttattcttttctcagttttgattcaccagggaattgtgtcatatcctgaagaatcaaaacgggaagaataatatattaattaaagcaatgcaagttgtatactaaaatttcagaggcttagtaaaataatatattttatggtcacataacaatttttttctcattaagaggacttctatatgatctttcagggatcatatcttctttcatcttctttctgcgtccttctctttcttcagccaatggatgaaaaaatagatgcagagaagacacatttggttcttattcacacttcacttccactcactattagtcagtgtggatagagccgagaatagcagtttcctggcaggacagccacttctcagcaataaacaacacactgaaagaaaagtatatatctttcatcaaaagctaatggattttaagcaaaataagcatatgcatcaataataaaatgcttgtggtaaaataaagatgaattttattgatttctattgagttccggtaatatttgaccaaaagctagcaaatatacagcaaaaaaaggaatattatttgaaataagaatattgtgaattaagttatcctgtcaacagaagtaaaaatattatggcatcatactaataatttcatctatagttgtacaacatcaaatgctttttattaaaaactgtattttatatcaatattccatttatatcaccctcgttcactatttcaatgccgtctccactttatatcagtggaaacaggccggcctgctcaaggagagcacgtggtgccattgctatgttaatgacgatgatgaagagaacttgtttgggtggtgctcaaagtactggttttctgtttttctctacatttacaaataaaataaaattcttagctaaaaagactctatctcattgaaatatgttttatgaaatttggttgacatttaagtgccactgatttatctggaatattgaaatttttatgaatccaaattgagtactataagcaatcttttactaaaagcctttgtgagtcagaataagattcattttttttttgttttttttttttttgagatggtgtctggctctgtcgccaggctggagtgcagtgacacaatctcagttcactgcaaactctgcctcccaggttcaagcgattctcctgcctcagcctcccaagtagctgggactacaggtgcgcatcaccatgccaagctaatttttctatttttagtagagacggggtttcaccttgttggccagtatggtctccatctcttgacctcatgatctgcatgcctaggcctcccaaagtgctgggatcactgcaagctccgcctcccgggttcacaccgttctcctgcctcagcctcccgagtagctgggactacaggcatgcgccatcacgcccagctaattttttgtattttttttagtagagactgggtttcaccatgttggccaggatggtcttgatctcttgacctcgtgatcagcccgccttggcctcccaaagtgctgggattacaagcctgagccaccatgcctggctcaaatggtttttctaattgttacttttatcatgttaatctaagagaaactatgtgcatactgattatgcattcaagacatattaatattaaagatctgcccacctaggcctcccaaagtactaggattataggcgtgagccaccgcgcccgaccgatcatgaaatttttataatatgaaagaaatgtgttaatcatgttcctagtaatcactttaaacacagcattatcagttcccagtattcaccctgagtcactcaggggaaattgtattaaacaattaatattaaagtgtttaaagtttaatattatatcacagcatggaatcctctaaaatgagttcattattaataaattcattatgttttcgaggtttttcaattgtgaaaacaaataataagatatgctttttcatgataagctcaattctaggaagttacccactggtctccacgttatttctgtaatgtgtagtgtaacactgggccaccagaatggtgcagatatgctgatttaatgagaataaaaatgagtacagcctccttggctgactattgctatcccagaggctgatcattcactacaacttagtaaatgctgctccatcatgccagtgagccctttcaaccaggttgcccttttcctcccattgatttgctcatgttgtggtctcctctctttatcttaagctatcccagatgagaggtgattatttcttgaatgaaggatatcccctttttatctctgtcatgagatcctcccttccttcctactggaagcaacatgtgggaggcaggaatgatgataatatacaagtatattttcttccatgtggtcaccataagcagcttacatgttccacgtagaagtcactcacttccaggccagcagggtggtttttctacgatgtgtctctttctcataaaagcacctctgactaagtttagcccaatcaggataatcttccttttgatgaacagaacatattagcagcctaatttcatgagtgattttccaccacagtaagtcacattttttttacactccaaaggagaggattacacagctggtgtgcaacagactgggaatcctggtgatcatcttagaattttgcctacccacctgcatagactattaaagtagttttgaagtttcttttgttatctaagtaaacaaagatatcatttgcaaataataattaactaccttcccattttattacaaatattaacatcttttttctggcttatttctttttcatgtaccattttatacatttacactcatatataacaatgaaaatgtattcaactattcaattgaatacaattgaagcatatcaatcattttattaaaaatgattgttaggctgggtgcagtggctcacgcctgtaatgccagcactttcggaggccaaggtgagtggatcatctgaggtcaggagttcaagaacagcctggccaaaatgggaaaaccatgtttctactaaaaaatagaaaaattagccaggcctggtggcgggcacctgtagccccagctacttgggatgttgaggcaggagaatcacttgaacctgggaggcagaggttgcagtgagccgagatcatgccactgcactccagcctgggtgacagagtgagtctcaaaaaaaaaaaaaaaaagtataaatacacaatggaatactattcagccataaaaagggataaatccagccctttaaaacaatatagataaatttggaagacattatgctagctgaaataagactgacacaaaaagacaaatactgcatgatctcatttacatctagaatttaataaattctacctcaaaaaagcagaaagtggaataatggttactggaagctgggtgtggtgggaaggaaataggaagttgttgatcaaagggtacaaggttttaaatagaaaggataagtagatttccagatctattgcacagcaggatgatgacagtaaactataaagttctttttctttcttgtttctttctttctttttctttctttcttttctttcccttccttcccttttctttctttctttttttttttttttttttttttgacggagtttcgctcttgttgcccaggctggagtgcaatggcacgatctcggctcaccgtaacctccacctcctgggttcaatcgattctcctgctgtagcctcccgactagctggaattacaggcatgcaccaccatgcctggctaattttgtatttttagtagggacggggtttctccatgttggtcaggctgagtcttgaactcccaacctcaggtgatccggctgcccccctcggcctctcaaagtgctgggattacacaggcatgagctacggcgcctggccaagtactttatttcaaaataactaaatttcaaatgtatcaccacaaaaaaatgattggtaagcaagttgatatgttattaaactcgacttatatcatatatatgcatatattgaaacatcacattttacgccataaattatacaactctgatttgccaatcaaaaatactattaatattgggtttttttaaatgagagaaactttaagaaattgcaccagagaaaaaagtgttcattcattttaaaatttcagaaaacatatacatattttatttcaatggcttgctcagttagtgatgtaagttagtaaacttttaaaactatgaatagtctgaaccaacactcaaataaagtatgttgatttttaatattcaaaataatataccttaaaagacagactctaaacaactggagtaaaacctctctaaatttgtaaataaataatttttttcacttgttagacaaaaaaagttctttaaatatatatattttaaatacatttaggccaggtgtggtggctcacgtctgtaatcgcagcactttgggaggccgaggtgggtggatagcctgaggtgaggagtttgagaccagcctggccaacatggtgaaaccctgtctctactaaaaatacaaatagtagccaggtgtgttggcgggtgcctgtaatcccagctactcgggaggctgaggcaggagaattgcttaaacctgggaggtggaggttgcagtgtgtcgagatcacaccactgcattccagcctgggtgacagggtgagactctgtctctaaataaataaacgaataaataaataaatttaaccaaataaacataaatcacaagtttattaaacaagtaatgaaacaatttgcttcattctctaattataaaactgacactcagcatttaagtggttgtatgtctagtgttactagtgtactagacagcaattctcaatgagacattttttcataatatttatatccatgctgtatgtgaatatatgggaatttgccaaggatagtgttagaaacattcaactactattatagccccagatggaagaattagaatgaacatgggttacaagccagtggtatggccatcttgttttcaggcttaacatttgtcatgatctaacagaatcaacaaataagagctaataaacttcctgtacactagctatgtgctgggcatttttatggctcctttatttgcattaactgctttaattttaccaaaaccctaggatttaggccctattatcctcactgtacagctgaagagtcatgcacagagaggcaagaaactgtgtttaggtcatataaccgttaagtggccgaactgggatgcagtcaggaacaaccaaacactgagtttcaattttaaccattatgctcaaccccacctcaaccaatgtttgtttttattcttgacctaatattttggctttaaattttaaatttaatagaaatacataggaatttaaaaaccacttctttttaccataggtagtatttacaaatcgatttttggtttaaagtactcattactggccggtcacagtggctcacacctgtaatcccagcattttgggaggcagacgcagacagatcacttgaggtcaggagtttgagaccagcctggccaacgtggtaaaaccccgtctactaaaaatacaaaaaattagctgggcgtggtggcgggcgcctgtaatcccagctacccaggaggctgaggcaggagaattgcttgagcccaggaggtggagactgcagtgagctgagataccgccactgcactccagcctgggaaacaaagcgagactccatctcaaaaaaattgctaagcttaacacactttggtaaatagatactaacaatggttttcctctcatgatttctaggagccaccaattttacttttgaaatatattgaatttttgtattaaaagcaagaatgagcctattattatataatttgtggtatccatgtacattattgtatattgagtgatctacagtttctgaaagtttcagaaactgtataactttttttgattgaataatttaagaatattaagtcttctcagtgaataaaatagattgaaattactgattagtcacttataatgcagcattaaatgttatttaataaatacttgaagctttttaaactcattttaacaacttctattgctatttcacttttattagaaagaaatattaacatttacattacttacaggcctctgaattttattcaaatctaaacatagtgctaattttaggagatctgtatgattaggattatggaaagcctttcctttatttacaagtagaagataaataactgctttccagtaaacacaaagaagcaaatttgattcacaaaagctattaaaatattaatactatcatctagatgaaacttttaggtatctgcattttcaagttgtttaacacataacaattcagaaactagtttttatgaaatataaataactaaaaatataaagttatcaatttttttcagttttgaaatactgtcattatttccagttgacataacattaaatttcagagctgtggctgttgaaactaggaagtcatggttgactctgctttacttgctgccttcttatttcacacaaacacagcagcccaaagatcagaaatgttacacctttattgtaaacacagcagtagctttctagggagaatatatatgtgtgtgcatgttaacttgaaattcacagcttcttttgttgaagtacagacttctatatgaaaaataatgggctgggtgcagtggctcatgcctgtaatcccagtaatttgggaagccgaggcaggtggatcacctgaagtcaggaattcgagaccagcctgaacaacatggtgaaaccctgtctctactgaaaatacaaaaattagccgggtatggtggtgagcacctgtaatcctagctacttgggaggctgatgcaggagaattgcttgaacccaggaggtggaggttgcagtgagctgagatcatgttattgcactccaacctgggtgacaagagcgaaattccaactcataaaaagaaaaaagaaaaagaatgaagcaaatatagaatcaaaaaaattctaaaaattccttctgaccgattattgttttttcctgagaatgattgtgatggaatggttgcagcagtgtggttttaacacacaatctctgtttcatcattcttcagctatggtcataagacttctatgcttttttaaagaaaaatattttctcttgttaactcagtaatttacatgatcttcacagcctcatattttcaaaaatagttcattctttaaaaaaagaaaagtaattaaatcacctaccacttttcctcaaaaagagtaacaaattaatcatatagtctagtgtatagttaatacataaaaaatacaggtgtagagtcatcttttttaaaattatacttcaagttctatggtacgcgtgcatgtttgttacatatgtatacatgtgccatgttggtgtgctgcacccattaacttgtcatttacattaggtatatctcctaatgctatacctcccccttccccacaccccacaacagaccccggtgtgtgatgttccccactgtgtccaagtgttctcattcttcaattcccacctatgagtgagaacatgcggtgcttggatttctgtccttgtgattgtttgctcagaatgatggtttccagcttcatccatgtccctacaatggacatgacctcatccatttttatggctgcacagtattccatggtgtgtatgtgccacattttcttaattcagtctacaattgatggacatttggattggttccaactctttgctattgtgaatagtgctgcaataagcatacttgtgcatgtgtctttatagcagcatgatttataatcctttgggtatatacctagtaatgggatggctgggtcaaatggtagttctagttctagatccttgaggaatcaccacactgtcatctgcaatggttgaactagtttacagtcccaccaccagtgtaaaagtgttcctatttctccacagcctctccagcacctgttgtttcctgaccttatcattattatcattatactttaagttctatggtacatgtgcacaatatggtttgttacatatgtataaatgtgccatgttggcatgctgcaccagttaactcatcatttacattaggtatatctcctaatgctatccctcccagctcccatcaccccacgacaggctccagtgtgtgatgttccccaccctgtgtccaagtgttctcattcttcaattcccacctataagtgagaacatgtggtgtttggttttctgtccttctgatagtttgctcagaatggtttccagcttcatccatgtccctataaaggacatgaacgtgtccttttttatggctgcatagtattccatggtgtatatgtgccacattttcttaatccagtctatcattgatggacatctggattggctccaagtctttgctgttgtgaatagtgccgcaatacacatatgtgtgcatgtgtctttataccagcatgatttataatcctttgggtatatacccagtaatgggatgacttggtcaaatggtagttctagttctagatccttgaggaatcgccacactgtcttccacaatggttgaactagtttacactcccaccaacaccgaaaagtgttcctaattctccacatcctctccagcacctgttgtttcctgatattattattattatattttaaattccatggtacatgtgcacaacgtgcaggtttgttacatatgtatacatgtgccatgttggcatgctgcacccattaactcgtcatttacattaggtacatctcctaatgctatgcctcgacactcccccctccccatgacaggccacggtgtgtgacatcccccatcctgtgtccaagtgttcacattgttcaattcccacctatgagtgagaacatgtggtgtttggttttctgtccttgcaacagtttgctgagaatgatgtttccagcttcatccatgtccctacaaatgacatgaactcatccttttttatggctgcagagtattccatggtgtatatgtgccacattttcttaatccagtctatcattgatggacatatgggttggttccaagtctttgctattgtgaatagtgccacaataaacatatgtgtgcatgtgtctttataccagcatgatttataatcctttgggtatatacccagtaatgggatggctgggtcaaatggtaattgaggaatcgcaacactgtcttctgcaatggttgaactagtttacactcccaccaatagtgtaaaagtgttcctatttctccacatcctctccagcacctgtcttttcctgactttttaatgattgccattctaactggtgtgagatggtatctcattgtggttttgatttgcatttctctggtggccagtgatgatgagcattttttcatgtgtctgttggctgcataaatgtcttcttctgaaaagtgtctgttcatgtccttcacccactttttgatggggttgattttttttcttgtaaatttaagttctttgtagattctggatattagccctttgtcagatgagtagattgtaaaaattttctcccattctgtaagctgcctgttcactctgatggtgttttcttttgctgtgcagaagctctttagtttaattagatcccatttgtcaattttggcttttgttgctattgcttttggtgttttggtcatgaagtccttgcccatgcccatgtcctgaatggtattacctaggtttttctctagggtttttatggttttacgtctaacatttaagtctttaatccatcttgaattatttgttgtataaggtgtaaggaagggatccagtttcagctttctacatatggctagccagttttcccagcaccatttattaaatagggaatgctttccctacttcttgttttcatcaggtttgtcaaagatcagacgcttgtgatgtgtggtattatttctgaaggctctgttctgttccattggtctatatctctgttttggtactagtaccttgttgttttggttactgtagccttgtagtatagtttgatgtcaggtagcatgatgcctccagctttgttcttttggcttaggattgtcttggcaatgtgggctctattttggttccatatgaactttaaagtagttttttccaattctgtgcagaaagtcattggtagcttgatgggtatggcattgaatctataaattactttgggcagtatggccattttcacgatattgattcttcctatccatgagcctagaatgttcttccatttgtttgtgtcctcttttatttcattgagcagtggtttgtagttttccttgaagaggtccttcacatcccctgtaagttggattcctaggtattttattccctttgaagcaattgtgaatgagatttcactcatgatttggctgttcgtctgttaatggtgtataggaatgcttgtgatttctgtacattagtatcctgagactctgctgaagttgcttatcagcttaaggagattttgggctgagaccaatatacaatcatgtcatctgcaaacagggacaatttgacttccttgtttcctatttgaatacacattatttctttctcttgcctgattgcccaggccagaaattccaacactaagctgaataagagtggtgagagagggcattcctgtcttgtgccagttttcaaagggaatgcttccagtttttgcccattcagtatgatattggctgtgggtttgtcacaaatagctcttattttgagatacgtcccatcaatacctagttgattgagagtttttagcatgaagggctgttgaattttgtcaaaagtcttttctgcatgtattgagataatcatgtggtttttgtctttggttctgtttatatgatggattacatttattgatttacatatgatgaaccagccttgcatcccagggatgaaactaacttgatcgtggtggataagctttttgatgtgctgctggattcgtttagccagtattttattgaggatttttgcatcgatgttcatcagggataatggtctaaattcttttttgttgtgtctgtcaggctttggtatcaggatgctgctgacctcataaaatgagttagggaggattccctctttttctattgattggaacagtttcagaaggaatggtaccagctcctctttgtacctctggtagaattcagctgtgaatccatctggtcctggacttttttttattggtaggctattaattattgcctcaatttcagagccagttattagtctactcagggattcaacttcttcctggtttagtcttgggagggtgcatgtgtccaggaatttatccatttcttctagattttctagtttatttgtgtagaggtgttcatagtattctctgatggtagtttgtatttctgtgggatctgtggtgatatcgcctttatcatcttttattgcatctactctcttttcttattagtcttgctagcggtctatcaattttgttgatcttttcaaaaaaccagctcctggattcattgatttttttaaagggttttttgtgtctctatctcctttaattctgctctgatcttagttctttcttgacttctgctaacttttgaatgtgtttgctcttttttttttttttgagatggagtctcgctctgtcgccaaggttggagtgcagtggcacaatctcagctcactacaagctccacctcctgggttcacaccattgtcctgcctcagcctcccaagtagctgggaatacaggcgcctgccaccacgtatggctaatttttttttttttttgtatttttagtagagacggggtttcaccgtcttagccaggatggtctcgatctcctgatctcatgatctgcctgcttcggcctcccaaagtgctgggattacaggcatgagccactgcgcccggccgcttctctagttcttttaattgtgacattagggtgtcaattttagatctttcctgctttctcttgtgggcatttagttctataaatttccctctacacactgctttaaatgtgacccagagattctggtctgctgtgtctttgttctcgtttgtttcaaagaacatctttatttctgcctaaattttgttatgtacccagcagtcattcaggagcaggttgttcagtttccatgtagttgagcagttttaagtgagtttcttaatcctgagttctagtttgattgcactgtggtctgagagacagtttgttataatttctattcttttacatttgctgaggagtgctttacttccaactatgtggtcagttttggaataagtgtgacgtagtgttgagaagaatgtatattccgttgatttggggcggagagttctgtagatgtctattaggtatgcttggtggagagctgagttcaattcctggatatccttgttaactttctgtctcattgatctgtctaatgtcaacaggggggtgttaaagactcccattattgtgtgggagtctaagtctctttgtaggtctctaaggacttgctttatgaatatgggtgctcctgtattgggtgcatatatatttatgatagttagctcttctaattgcattgatccctttaccattatgtaatggccttctttgtctctattgctctttgttggtttaaagtctgtttcatcagagactaggattgcaacccctgctttttttgtttgttttccatttgcttggtagatcttcctccatccctttattttgagcctatgtgtgtctctgcaggtgagatgggtctcctgaatacagcacactgatgggtcttgactctttatccaatctgccagtctgtgtcttttaattggggcatttatcccatttacatttaaggttaatattgtaatttgatcctgtcattatgatgttagctggttattttgctggttagttgatgcagtttctgcctagcattgatggtctttacaattcggcatgtttttgcagtggctgataccggttgttcctttccatgtttagtgcttcattcaggagctcttgtaaggcaggcctggtagcgacaaaatctctcagcatttgtttgtctgtaaaggattttatttctccttcacttatgaagcttagcttggctggatatgaaattctgggctgaaaattcttttgagaatgttcagtcaggcgcggtggctcaagcgtgtaatcccagcactatggaaggctgaggtgggtggatcatgaggtcaagagattgagaccatcctggctaacacagtgaaaccccatctctactaaaaatacaaaaaattagctgggcatggtggtgggcgcctgtagtcccacctactcaggaggctgaggcagaagaatggcatgaacccgggaggcggatcttgcagtgagccgagatcgcaccactgcactccagcctgggcaacagagcaagattccgtctcaaaaaaaaaaaaaaaaaaaaatagaatgttgaatattggcccccagtctcttctggcttgtagagtttctgccgagagatccactgttagtctgatgggcttccctttgtgggtaagctgacctttctctctggctgcccttaacattttttcctctatttcaactttggcgaacccgacaattatttgtcttggagttgctcttcttgaggagtatctttctggtgttctctgtatttcctgaatttgaatgttggcctgccttgctaggttggggaagttctcctggataatatcctgaagagtgctttccaacttggttccattctctccgtcactttcaggtacaccaatcagacgtagatttggtcttttcacatagtccttatttcttggaggctttgttcatttctttttactcttttttctctaaatttctcacttcatttcattcatttgatctttgatcactgatactttcttctacttgatcaaatcagctactgaagcttgtgcatgtgtcagtcacgtagttctcttgccatggttttcagctccatcaggtcatttaaggtcttctctatgctgtttattctagttagccatttgtctaatcttttttcaaggtttttagcttctttgtgatgggttgaaacatcctcctttagctcaaagtttattactacccatcgtctgaagtcttcttctctcaactcgtgaaagtcattctccatccaactttgttccgttgctggcaaggagctgctttcctttggaggagaagaggcactgtggtttttagaattttcagcttttctgctctggtttctccccatctttgtgggttttatctacctttggtctttgatgatggtgacgtacagatggggttttggtgtggatgtcctttctgtttgttagttttccttctaatagtcaggaccctcagctgcaggtctgttggagtttgcctgggtatcaccagcggaggctgcagaacagcaaatattgcagaatagcaaacgttgctgcctgatccttcctctggaagcttcgtctcagaggggcacccggccatataagctgtcagtcagtccctactgggaggtgttgcctagttaggctacttgggggtcaaggacccacttgaggaggcagtctgtccattctcagatctcaaactctgtgctgggagaaccactactctcttcaaagctgtcagacagggacgtttaagtctgcagaagtttctgctgccttttttttggctatgccttggccccagaggtgggagtctacagaggcaggcaggcctccttgagctgcaataggctccacccagtttgagcttcccagccactttacgtactgaagcctcagcaacgacggatgccccttccccagcctcactacagccttgcagtttgatctgacttctgtgctagcagtgagcgaggcttcgtgggcacaggaccctccaagccatacgtgggatataatctcctggtgtgccatttgctaagaccattggaaaagcacagtattagggtaggagtgtcccaattttccacataccatctgtcatggcttcccttggctaggaaagggaattccccaaccccttgcgcttcctgggtgaggtgatgccccgccctgcttcggctcactctccgtgggctgcacccactgtccaacaagccccagtgagatgaacccagtacctcagttggaaatgcagaaaatcacccgtcttctgtgtcactcaagctgggagctgtagactggagctgttcctatttggccatcttggaacctcccttaaatccagagtcatctattttaactgcacacttgggaataaaagacatcttgggctataggccaagagctttcagagaagatagcttacaaaatgtggggcgactgggtatagaaacatttacccctatgccttaaggagtaaataattctttcactgctaattccaactattaacttggaactacagaaatataacatttcattgcaccacaaaacatcttgttatttctattttagattcagggaatacacctgcagattggtagcataggtatactgcatggtgttgaagtctggacacttttaactatcccattgcccaagcagtgtacactacacatggtaagtagtttttcagtgtttgtctccctttcttcttccatctttttggaattcccagtgtttactgttttcatctttgtttccatgtgcacccagtgtttacctcccacataaaagtgagaacatgtggtatttgttttactgatctctgttaatttgcttacattaatggccttctgctgcattcatgttgccacaaaggacaatatttcattcttttctgtgactgcatagtattgcagtctgtaagtacctcatttttcttatgcaatctaagatttataggcacccatttctcctgaagtcaggatgaagttgaaacagctgtttctccacaacttcaacatgtaattttttgacttataacagccattctaactggtgtgaaatggtatcatattgtcattttgatttacatctctgatgattacagatgttaagcattttttgaatgtttattggcaactcttatgtcttcctttgagaagtgtcaatattttctgctttgtcaaattaaatttcttatagattcgatatattaatcagttgtatgcactttgcaaatattttatttcatattgtaaggtgtctgtttcctttgttgatagtttctttggctgtgcagaagctctttagtttaattagatgcaaatttttgatttttattgttgttgcacttttaagatgttattcataaattcattccagaggccagtgtctagaacagtcctttctaaatgttcttctaggatttgtgtagcttgaagactcacagataagtccttaatctatcttgacttgcattttctatatggaaagaggtaggagtccacttttttctgcacataaccagttttccctgtaccatttattattattattacttttgaaacaaagtctcactctgtcacccaggctggagtgcagtggcgccatcttggctcactgcaatctccccctcccaggttcaagtgattcttctgcctcagcctcctgagtagctgggactacaggtgcctgctaccacgcctggctaatttttgtatttttagtagacagggtttcaccctgttggccaggctggcctagaactcctgacctcgtggtccaccagcctcagcctcccaaagttctgggattacaggtgtgagtcactgcatccagcccccacttattaaatagagagttattttccctttgttaatttctgtgggctttgtgaaaattaacttggttgtaaaagtgtagatttcagggctttctcttctccattgatctaaatgtatattttcataccagaaccatgtaatactggttactgtagcttgtagtacaattttaaatcaggtaataggaggcctctggtttttgtttttttttttttttctgacgttgccttgactatttgggcttttattctttcacataaattagttttctttgctgggcgcggtggctcatgcctgaaatcccagcactttgggaggccgaggctggcggatcacgaggagtttgagaccagcctggccaacatggtgaaactctgtctctacaaaaatacaaaaattagccaggcatgatggcgggtgcctacaatccccgctatttgggaggctgaggcagaactgcttgaacctggaagatgtaggttgcagtgagcccagattgtgacactgtactccagcctgggtgacagtgaggctctgtcttaaaaaataataatttaatatggttcacttaccataaactctctaaaattctaatttctatattttctaggaaattttatatttgtcacactttggataagaatctagtaagactctaacaatattttttctttttacaaagaaagcagcacaacactaactgatttaatcctctcacctgtggacatgtatgccttttatcttaattaactgatctgaaagttatattgataagcaaactctccagttaaaaccattttttcagttcattaaaaaataccaaacttctcatcaaaacccacaaaataccatgtgagatgacatggcatgaaaaaaacagtgggataactgcagccagtaacacagaaaaagaagaagggctatgatgtatacgtgggtggaatacacataaaaagacaaagcttaagataattagaaaataaatgaagcagaatttctttttaaattcagtaaaattcagctttgcagcctgaaaaaaaataaaatgtcctctccacatgaagaatcaatgttatttgtttacctttgatattttccacctgacttgcagtttgcaactttcacagaagtatttatgccttattatggagcatctgttatacagcaagcactgtcatgtttgtttgctacatttatgtataaaaacattctcatgacttatgaagtttccctagtacttacctgaacaaattgcctaacgaataaatttacttatatccatcacaaaaagtgaaaaaaaaataacataagaaaagtaggcttatatagggttctccaattaaatgaaatgttctaactaaataaaatataatttaatgcactaattttagaattacagctaaaaattattttgtgtacatgactaagtttattttattttgaagtggagtcttgctctgtcacccaggctggagtgcagtggcacaatcttggctcactgtgacctctgtctcccgggttaaagctattctcctgcctcagcctcccagtagctgggattacaggagcatgccaccatgcctggctaatttttgttatttttggtagagatgaggtttcaccatgttggccaggttgatcttgaactcctgacctcaagtgatccacccacctcggcctcccaaagtgttgggattacaggtgtgagccactgcacccagcccataactaaatttcattaaaatcattcttataatcacagagcagctcacaaaatgaatacctcataaactataaaacaacaaatatatatcagaaacaagaaatttatgggcctagcatgagtaccagacaagtgaaaacaagagaatttgaatggcaagattctgaaccataagccgtaaaattatacagtaaaattcaatacaaaccagagtatagatttgcattcatttttgaggatttttgttttctagaaaagtagacacctgaccaggtgtagtggctcacgcctgtaatcctagtactttggaagattgaggcgggtggatcacctgaggtcaggagttcaagactagcctgaccaaaatgatgaaaccccatctgtactaaaaatacaaaaattatctgggcatggtggcctgcgcctgtagtccttcctactagggaggctgaaacaggagaactgcttgaacccaggaggcagagttacagtgagcggaggtcacgccactgcactccagcctaggcaacagagtgagattctgtctcaaaaaaaaagaaaagaaaagaaaaagaaaagaaaattagacaccttattaaaatgatgtcttgttccaatattattctgaaaatagttacaaactcatactcaaacacacttaatccataatcttcttacacctaaggtttatatttagactaatagatgtgtacatttaactctatgtaaatcaaaactaaaagcctgtatctgtttgcaagcagagaggccacatattcaaagaaaaatatacaagaaattatttttaagtatttattcaggactcagaaatgtgtaaattttatacgtctatataatttttattattataaaaataaccctgtagtcaataataatcgtatattttaaaaaaactaaaactgtacaattgaactgttcataatacaaaaaataaatactaaaggtgatggatacctcatttaccctaatgtgattattatatattgtatgcctcttatcagaatatgccatatataacataaatattatgtgcctgaaaaaactaacaaaagtaaatttaaatgggaaaaaataaataaaagttttacctacagaaacaacattccttatttgcagtttaaagccactggaaaaaagattagtactacagatgttagtgcattcttttaccaaatagtgtattgttaccaccatttattttatttacttatttattttttgagagggagtctcactttgtcacccaggatggagtgccatggcatgatctcggctcaccgcaacctctgcctcctgggttcaagtgattctcctgcctcagcctcccgagtagctgggattacaggcatgcgccaccatgcctggctaattttgtatttttagtagagatggcgtttctccatgtgggtcaggctggtcttgaactcctgacctcaggtgatccgcccgcctttgcctcccaaagtgctgggattacaggcgtgagccaccgcgcctggccttgctaccaccttttacctacacccttgagtaaggtggactaggttaaagtaagtggaataatgtgacttgattgaatgcacaatatttaaactgtttaaaatgttgaattaagaaattaagttcacacataatctaaaatttttaacatactgcctttttttcataaaagtacaattagtaaaataatatactaatttatttttaattttaactaaaacaaaatttgtctctcaatataatgcagaatattactcggaacacctacctcatgcatcactcagtactgtaagtgaatcacaaagaacctctttacttagattttcatcatgcattttaatgtccttactctttcatagaagaggtcataaatgctcacctaataaaaaataatctctcatatcttttggtcacatgctttcacatatgaatacaataggaataaagaaacaacatcagccaggagcagtggctaacacctgtaattccagcattgtgggaggccaagctgggcggatcacctaaagtctcgagttctagaccagcctggccaacatggcaaaaccctggctccattaaaaatacaaaatttagccaggcatggtggtttgtgcctgtaatcccagctacttgggaggctgaggcaggagaatcacttgaaacctggagatggaggttgcagtgagctgagatcgtgccactgtactccagcctgggtgggcgacagagcaagactccatctaaaaaaaaagaaaaagaaaaaagaaaaagaaaaactaatttctttagcatgaagtaatttgagagttaattacaacattaacatgaagtaatttgagttaattacattatttgtatgaagtaatttgacagttatttacttttaaaaaaatctgtaatctttctaaaaaaaagtatacttgtaactctccaaagaatcttctactcttttaaagttataaacaaataatttttctaccaagtttagttttggattattttctaaactcagaactctgattcagtgtaaagtctgaagtgtcattgccttatatatttctaatgtaaattctctgatatttacatagacttaccattgaattaaattttttttctatttactgtatatgcaaaaatattttaatatgaactctggaattttctaacctgtagtttttgaataaatgtttttttctaaatttattacatttacagggtttttctttgatataaattctctgatgttgaacaaagtttgagcaattgcctcagggtttgctctaatacagaatgaatacaacaagatctgtgttacaagtaaagttaccacaacttcgtttatatttgtaatgtttgtcttcaaaataaatcctcttcagcactttaaatgcttatattttctgaactcttttgacagtaattgcacctttaatgctattaagtataaattctctgatgctgaataagatgtgtgcagatattaatcacttttttactttctttatatttgtacatttgttctcatcaagtataaaggctttcctgtgcaataaggtttgagcattgtgtaagttttgccacactgttcacacttgtagaagttttctccagaatgaattaccttacctacaatccagtgtgataaccatttaaaggctttgtcacattcatatttctattatttctcaccagcacaatttcttttatatttggaaatctttgcaatgttgtcacaagcattgttacaactttcaggtttgtagagtttctctccagtatgaatcatcttatgtctgttaagaatagaggagttgttaaaggctttgccgcattcttcacacttgtagggtttctctccagtatgaatcatcttatgtgtagtaaggtgtgaggactggttaaaagctttgccacattcttcacatttgtagggcttctctccagtatgaattaccttatgtttagaaagagttgaggactggttaaaagctttgccacattcttcacatttgtagggtttctctccagtatgaattatcttatgtgtagtaagttgtgatgataggttaaaagctttgccacattcttcacatttgtagggcttctctccagtatgaattctcttatgtgtagtaaggtgtgagaaccggctaaaggctttgctacatacttcacatttgtagaatttctctccagcatgaattctcttatgtgtagtaagggttgaggattgtttaaaagctttgccacattcttcacacttgtagggtttctctccagaatgaattctcttatgtgtagtaaggtgggataaccggctaaaggccttaccacattcttcacatttgtagaatttctctccagtatgaattatcttatgtgtagtaagggttgaggactggctaaaagctttgccacattcttcacatttgtaaggtttctctccagcatgaattatcttatgtgcagtaagggttgaggactggctaaaagctctgccacattcttcacatttgtagggtttctctccagtatgaattctcttatgtgtagtaaggtttgcagattggttaaaagctttgccacactcctcacatttgtagggtttctttccagtatgaattatcttatgtgtagtaaggtgtgagagccggttaaaggcttttccacactcttcgcatttgtagggtttctttccagtatgaattcttttatgtgtagaaaggtttgaggcctcattataggctttcccacattctttacatttgtagggtttctctccactatgaattcttttatgttgagctaagtgtgaaagcatgcaaaatgacttttcacattctttacacttgaaagatttctttccagtatgtcctatcttatgtctgtttgaatttgaaaatttatgaaagactttcacatatttgtcatattgaaatattttgttctgggtagttgtcaaacactggttaagtccattgtaacattctttgtgcaccttacactcatccatgcttttacagtattttcttaactgtaaattttcacgtccacattttttatatgttctcagtatcactttttggaaataattttttttgccctgctttggccaaaggtcttgggcaaaataagaatatacaactgaaagaaataaaaataataaattacttcacttactagactcagatgaatgtactttacaaatctaacctataaaattatacaaactacatcacaagatgttacagcaaaatattacacgctctaacattttcacagacatataaaagcatacagaacaaattacatttctgaaaaattaaagtaagttaagtgtgtgcagtgccccagatgagcccaatgcaaagagccacacagaagaaagaaaagtctgttacatttacccagtgcagatcttcctgcttccctatataacatagtgactttagaaataaattgccaactcctggtttcattttcaaaagacaagtaaaataatggcttatacatctttatttctcaatggcaaggtcttttacactggttcctgtgtctcattgcataaaagttctgaaagaaatagtggtattctttcaaatgacagtttgaggctgctgagatgaaaggtaaggtaccaaaacagatatatagaccaatggaacagaatagagacctcagaaataacaccacacatctacaactatctgatctttgacaaacctgacaaaacacaagaaatggggaaaggattccctatttaataaatggtactgggaaaactggctagccatatgtagaaagctgaaactggatcccttccttacaccttatacaaaaattaattcaaaatggattaaagacttaaatattagacctaaaaccataaaaaccctagaggaaaacctagacaataccattcaggacacaggtatgggcaaggacttcatgactaaaacaccaaaagcaatggcaacaaaagccaaaattgacaaatgggatctaattaaactaaagagcttctgtacagctaaagaaactaccaccagaatgaacaggcaacctacagaatgggagaaaatctatgcaatctacccatctgacaaagggcaaacatccagaatctacaaagaacttaaacaaatttacaagaaaaaaactaacaaccccatcaaaaagtgagcaaaggatgtgaacagacacttctcaaaagaagacatttatgcagccaacagacacatggaaaaatgctcatcatcactggccatccgagaaatgcaaatcaaaaccacaatgagataccatctcatgccagttagaatggtgatcattaaaaagtcaggagacaacaggtgctggagaggatgtggagaaatagaaacgcttttacactgttggtgggactgtaaactagttcaaccattgtggaagacagtgttgcgattcctcaaggatctagaactagaaataccatttgagccagccatcccattacggggtatatacccaaaggattataaatcatgctactataaggacacatgcacacgtacatttattgcggcactattcacaatagcaaagacttggaaccaacccaaatgtccatcaatgatagaatggattaagaaaatgtggcacgtatatactacagaatactatgtattcatgaaaaaggatgagttcatgtcctttgcaggcacatggatgaagctggaaaccatcattctgagcacactatcacaaggacagaaaaccaaacaccgcatgttctcactcataggtgggaattgagcaatgagaatacctggacacagggcggggaacatcatacaacggggcctgttggggtgtgaggggctgggggaaggacagcattaaccaccatggcacatgtatacctatgtaacataactgcacgctgggcacatgtaccctaggacttaaagtataatgaaataaataaataaataagaaaggtaagttttacagcagcagaaagactgtggtactacagacaggaaacaattatagcaagtgattattggttattaaggagtttggtggctcaaacctgtaatcctagcactttgggaggccaaggtgggaggatcaactgaggtccggagtttgagaccaagccttggcaacatagtgaaaccctgtctctactaaaaatacaaaagtagctgagcatggggtcacatgcctgtaatcccagctaagtgggaagctgagaccagataatcacttgaaccggagaagtggaggctgcagtgggctgagaccatgccattgcactgcagcctgggtgacaggagcaaaactctgtttcaaaaagaaaaaaaaaaaaaaaaaaagaaaagaaacacgaataaactccgctgactaaaaactaaacacaaaattttagacaaggcacatcctaagaacatgtttgagagactcccagaatctctagccaagataattgttttcagactatgtcagaaaaaaaaaacattttaaagactgtgacaggtagcttttttgatgtccaaatctcattccagattacaatgtatacaaaacagggcaatataatttcatcaaaaataccatataaacttcagaaagaaaccataaaaaagatgtacacgttttaaacactaataagttgaataatatccaatgagtgaaacaggaacacagtccactgtagaaaatcacaaaaatgagaataaaaacaagaatatcaaaatattaaaaaaaaacaatttggtggtaaaaaatagaaaaataaacaactggaaaatcctaaaagaaaaatgatgtaaaaatgaagttcaacaaacaaattaggatacacacacagatatttaaacaaatacatattaagcacattttcaaaaatcacagacaggaagaaagtcttaggagcagcaaggtaaaagtaatgtgtcatttacaaacatagtcttatgatataaccagtgaattatcaacaaaaattttgcagatcagaaagataccgtgtgacacaaagtcctgaggggggggaaaaaaaaaagctatcaagttgagaataataccatcaacaaatctgtcctgccacataaaaagaaaaaaccttccaaaacaaccaaattctgaaaaagtatattagcactgcatatgccctacatataaaagatgatgaaagcagtttcttaaactgaaagtaaaagtattaaaaaaaaacacataatcatataaaaatacattattttccaggaaagatatgcacatacataaaaacagaatcttgtggcattatcataatggtgcagaaaacattttaaattatctctaaattttgaaaaataaaagcacagaaattataaacatctgttaatgaatatacaatgtaaaaacataattagcaacatcaaagacaaatttcagggcagatgtaatgaggaagatttttttattcaactgagatttattttataccaaattaaaactatactgttgtttcttatagaagttttatggaacccccaaggtgccaccaaaaaaaaattctgtacaaatatacaaaagtgaattagaaataagtaaaagcatatcaatacaaaaatcaaaaagacacaaagagagaaaatgagaaacaaagatgcaagaatcaaataaaataattaaaaatgtaacagtctgtctttatcagacagttatttaaatgtatatataaaattaacttttaaatcaagagacatactttcaacagattaaaaattttaaaaaccaagatccaactttttttttctacaagagtcagtagagatctaatgataaaaaacactaaaaggggcaagatggaagaatacatttcatgcaaatatgaatcaaatgagagcagaagaaatcaagatagtattatgcaagctacatcttaagtcaaaaactgtcatgttttacaaaatgtacttgaagttaaaactccaaggagacaaaaaaggacattaaaacttacagatttaggctgggcatggtggctcacgcctgtaatcccagcactttgggaggctgaggcaggtggatcacttgaggtcaggagttcgagactggcctggccaacatggtgaaaccgactctactaaaaatacaaaaattagccgggcatggtggtgggcgcctgtaatcctagctactcaggaggctgaggaaggagaatcacttgaacctaggaggcagaggttgcagtgagccgagatcacaccactgcactccagcctgggacacagagtgagactctgtctcaaaaaaaaacaacaaaaaaaaaccacttcagatttactcactgggaacctatgacaaatctgtatgtacatctgtgtgtgtgtgtgtgtgtttttgtgtgtgtgtgtgtgtgtgtgtatctcacattagggctccaaacatataaagcaaacattgacagaataacagagacacatagagagcaacataattatagtaggatattttgacactgcacttgccgtaataaaaattaaatgagaatattagtaagggaatagaggacttccaggcagtgtaagacaattatttctaacagaggtatagaaaacacccctcaacaccaggacacacatggttctcaatagctaatacaacattttccttcatagacctcctcttattacaaaaaaaagaaaattaagtcttaccagtttttttaaaactgaaattttataaattactttctatcaccaaaatgaaatgagtatacaacgagaaaaaaaatctgaaaaattaacaaatatatagaaattaaacaacacactcttgagcatgctcttgtgaaaggctgaaaaaggtaatactgtaaagatgtccatcctgctcaatgcaatctacagatttaatgcaatgtttttcaaatttctcactgcatttttgaagaaacagaaacagcaatccctcgagtatacagaatctctacatacaatgaagtacccaaaaatattaaaaacaaaacaaaacaatgttggaggcattacagttcctgatttcaaaacacaaagctacagaattaaaacaatttggtatgagtataaaggtgaaaaagtagactaataaaatagaatgcagcacatatataaactctcacatatatggtcacatgaagagtcatttgcatacccacatttattttagcattgttactaaaagccagtaggtaaaagcaaggcaaatttcggtcaccaaatcgttcagcagatataatttgaaatacaaaaatgccaaaatattactcagtttgaaaaaaagcaggaaatattctaacaactataaaggtaaatcctgatgactttatgcaaaataaaatgagccagccacaaacagattttatgagatatacaaagcagttatactcttagaaacagaaaacagaatggcatttgaaaagtgccaggaaatgggaaaaattggtagttgtttaatgtgtattgtaaactttctagaaatcttttataaaataatgtaaatatacttaacatgcctgaaatgtacagtgtttttgagtcagggtctcactctgtcacccaagctggggtgcatggcacaattacagctcactgcagcctcaaacttccaggttcaagtaatcctccctcctcaatctcccaagtagacaggaccacttcaccatgtctggctacgttttaaaatgctttacagagatgaggtttccatatgtcttccaggatgttctcaagcttttgggctcagtcttcctgccttggcctcccaaaatccggggattacagacgtgaaccaccacgactggccatgaaatgtacattcaaatagatttaagatggtaaattttaggttatatgtttgtacaattgttttttagaagaataactgaagatccagaattataaacctttccaaaaattaccttcaagtcacaaaagtgtttccctcacacataggaaatatgtttattattaaacacaaggtgaaaataagactatttccatgactactcatttagacaagataaagccaccattaaaaatcagctaagaaaaaatatatacaagattagccataaccaaaattggggtcatatttatagataaaaacacacacacatataatcagattgtaatagagataaggctgatttatctcttaaaccccacaccgacttacatgtaaaaacagaattgcaaattgtctaaaattgtaaaaccaaaaaacacaataaacttatgttaagaaacctacactgaaaaaacgcattaatatgaaactaaaaaataataataaatgtttactcataaaatctggtatgtaacttgatgtagcattaacaaagaatttgtgtagataactggaatattttactgtaactgtgtactcattgaaggtggctattttgaatcattggcatgcactgtaatgcagtaaaagtttcagataaaatgcagtataatcataaacagaagactctaatgacaaactgataaataagcattttaataaataagatcatttctaagttttaaatatatgctattcttacacaaaataaaactgctgtaatccaaatttagaagcaaaaaatagccttacattgctaaataaagaaaaaatatatctattttgcagaatatggtcagggcctctgatatataaaacaaatatttgggaacaaattatgtcatattttaggtactagctgacaaaagtgagtgaaaatcctgtctttttttgcctgtctatatttcctttttgtctgtctactaattatctaattcacctcagacataacatgtcaattttagtatattgtcctaaatgtctaaatctaaaactactgacaaaattgaaatagaaagtagaaagtaaaaatgtacaggaagagtgacatcactaagatggaaaaataaatggtgccttatttgcttattttctgacagcaagaaaattcatcagcctgataaaaatgcctttatgagagaaacaggaatcatgactcaaacctgtaatgagaaatgctttaggacagaacttcaagatcaacctgggtcatgtagcaagaacccatctccaaaacaagtgcccttaaagagctttgagatctatggagggagttgtgaaactctgctaatgcccaagattgaggaatattctcttcagaaggcaggctttcattcaggtggcaaactacaggacccctgttcttggctacagaccagaaaatggcccaccaaacttggtcccactgagaattctgaacttaccctgcaatcatcccaaactcctcccagccacagtctgggagaggtcttgccctttcagaggtctggagagagacacccctttatagccacgcagcaggcctgcagaccttggccattactgtggtccctgaagcagtttcatgactcagttttatcaccctgagccacagttcatggcaagttctgcctatgtagaaacccacacagtgaccttgggaaatcctctctggtactcagtgaaagccaaactcatctacatcctaatataaagcctaccatatgcagacccaagtgcagaaatctgccctagcgtctgccctacagagcaaagtcctgaaggatactcactctgtccaaaaataaaatgggaattacaactacctaagccccttgtaacaagccaactaaaggtggaccctaatgcagacccagcagcctttgtaaacaagctacctacccctctccactacaaacccataggacatcccatcaccctgggggctcaacaaaagatcttcactttctgaaaccaatttataaaaacttgaagagggccaggcgcggtggctcacgcctgtaatcccagaactttgggaggccaaggcgggtggatcaccaggtcaggagttcaagaccagcctggccaacatggtgaaaccccatctctactaaaaatataaaaattagccaggcatggtggcacgcacctgtagtcccagctactcgggaggcagaggcaggagaatcacttgaacctgggaggtggaggttgcagtgagccgaggccgcgccactgcactccagtctcagcgacagagtgagacactgtctcaaaaaacaaaacaaaacaaaacaaaaaaaaaacaagaaaaacttgaagaggtgtttactccttcaaactcacagacaccaatgcaaaagtttattatgcccattctcaatgcttctattttaacacagcactggaagtatgtggaataagtaaaaaaaaaaaaaaaaaaaatttaagtcactgaaattgaagacaaataagtaaaaagttgctttttgtagatcatttgatcttgtatatagaaaaccataaacagtacatttaaaacctaattaaagtaataattacactcaataagttagcaaaatagaaaattaacatacaagtgtaagttatggttccatacactttaaacaaactatctgacaaaagagagacagaaagcaatcttatttacaatagcactaaaataataaatttctgagaacaaatttaaccaaggagcttaaatatctttcaaataaaagatacatcaataattggagaagacaaaaataaatttaaaaacatttcatgtctattgattgaaagaatttttttttttttttgagatggagtttcactcttgttgcccacattggagtgtagtggtgcaatctcagctcactgcaacctctgcctaccaggttcaagcaattcttccgcctcagcctcccaagtagctggaattacaggcgcctgtcaccacgcctgactaattttttgtatttttagtagagacagggtttcatcatgttggccaggctggtctcaaactcctgacctcaggtgatccacctgcctcagcctcccaaagtgcagggattacaggcgtgagccaccatgcccggctgaaagaatattattaaagtgccgtgttatctacagtgatctctagattcaataaattccctatcaaaattccagtattttttttttacagtaatagaaaatacaattctcggtcaggcacggtgggtcacacctgtaatcctagcactttgggaggccaaggcaggcggatcacaaggtctaggagttcgagaccagcctggccaatatggtgacaccccgtctctactaaaaatataaaaattagccaggcatggtggctcgcgcctgtattcccagctactcaggaggctgaggcagaagaatcgcttgaacccaggaggcagagattgcagttagccaagatgatgacactccactccagcctgggtgacagagcaagactccatctcaaaaaaaaaaaaaaaaaaaagaaagagaaaaagaaaatacaattctcacatagacttacaataaactttgaatagccaaagcaatcttgaaaaaaaaaggacaaagcagaagaacatcatactttataatttcaaactatacttcaagactataataagacagaatgcaatgtgcagaaaaattagcaataaaaaaccaatggaacagaaaccactgctctcacacatttaggacatgatgtaaaaacagaacttgaaaaacagtttaacatagagtttctcaaaattatgcagattatctatgtgttttcaaaaacaatgaaaaagcagtcagatttcacagtctcttatgtgccatgaagagggctgtcttggctgtcactgtaaacctgaagaagatcaccaaagggaaagtaaaatctttagagattttaaaaatataagacagaagatgcttctatgtgaaagcaaaatttaaaaaattcaagtttcctagaaactatttcctttggaacacagatttcaaatcattttaaggaatggctttttttttttttctactttggagctctcatctgtgtcgtctgttgtattcactttcactctcacctacctgggggttcagttaccatctcatgtctcttcacattccaaggttcttttccttgctccagacaggtgatcaggtctggcttagaggcagcaatacctgttttattacaaataacatgaatcttgctcatattctccaattaccaatttagtagtgtgttcagtaaaaaggatgtaatagaatattctagtaaattgattccaaaatactaatacacaacaaaaaattttaaatatttaggaaatattttaattttgtaagttcttaatttcactacctgatactactaaatcaaaaactggtagtggcaattagattttaagatgtgggcaacagtatgttatgccactaaatttctaaaattaacactaatctagagtgaagaacacagatcagctcaggagtgtggaaagttcagatcaaaatgaaacatcttgaaattcttttctacatagacaaatcttgaagttaaaaaaaaaaaacaaaaaaaaaaaacagagatctgaaagcataaactaccaaaaaaaccattctacaaaaaagagaaataaaatttatagggtatattagggaattgtatattgaagttatcctcacccacaaagaccaggtttctgtagttctctaacatcacattcctatataaattctgctgtgcggtgtccaggcattgccactcctccagagagaattctaaggccacatccctaaatgtcaacactccctgaaaaacatacaaacacacatacatatttaccaagtggccataaacagaatttttaatttgactcaaggtaaaacaagagtaaagagaactggttcttacttataggagtgactgatatatttaataaataactttcagcacagaagtattctctaatgtattctctaactctgagaaaagagagtggcataagatccacaacatcgaggtatagatgatacttttttggatgatgaagtataaaactgagggcattaacactaacatgtacacttttgagtgctacatttacatcatacagaataagttgtgtaaatttttcagatggaaaagacatattcagttagaaaatactgctcacatgttaatgtgtaaaataaactggagatcttgttaatgcagattattttttcagaaaatctgggctgggagcgatggctcacgcctgtaatcccagcactttgggaggctaaggcaggtggatcacgaggtcaggagaccgagactatcctggctaacacagtgaaaccctggctctactaaaaatacaaaaaattagccaggcgtggaggcgagagcctgtagtcccagctactcgggaggctgaggcaggagaatggcatgaaccccagaggcggagcttgcagtgagctgaaatcgcgccactacactccagcctgggtgacagagcgagactccgtctcaaaataaaaaaaagaaaagaaaatttggaataaaatctgagtttctgaatctctaacaagctcaccagtaatgcccatgtttttggtccaagaaaactattttgtcaaacatccagtaagtggaagagcctgtgtgtttttcagtttttctggcctgtaaacaaagatgagagctttcgttttccaaagacagataaatgcaaagaaaacctaagaaaggtcagctgccagattaaatgtgattgtttatgcacatctgctgaataaagatactcaataatgaagagaaaaataatgaactctatagaaaaaaaaatctgtcagagttcattaaccaagtgagttattaacatcaactgcatgaagataaatttttatgatgtgctgatgcacacagaaggacacggcatcactgctatggtatctcccagccaaaagtaaatcatagcctgaatttaatcataaagaaacattggttttatgcaaagttccagatactgatatctgccatgttctgtaaattttaatagtgattttaagtagtctttctttcacaccctaaagagcaagtatctcctaataatttttttttcaaaactgtctgggtaataaatgccatcccatttaagcaagcattttcttaatcctgttctgcatagagttaatggagaacagagatagaacctcaacattacatgctctccatctttactacggactccagcttttccccaataggaatattcagtatccaccctttccatgttccacagccaggaaagaaaccttcttaatattgcagttcataaattcatggtgagaattctttatgacgtgtaagaagccatgatgttgagaatgtaaagaagactctggtatataggaaagaaatatttttcagacacccctgactattataagaactaaaaagcagttaaactcattaggaagaaaaagcacatgtagaaaagtaaagctttgcaagtactgaacatatggcattctaggacacagagtggacacagctcttcatctgagacatgcttagctaaaaaaaaaaaaaaaaaaaattaggggcagggcaaagatggccaactagaagcagctgcgatcagaggctcccaccaaaaagaaccataatggcctgtgaatcctgcacttgcacctgaggtatccaggttctctcatcagaactgactaggcagctggcatgacccacggagaggaagaaagagcagtgtggtgcagcaacccacctgagagccatacggggaaggggagcccccaccccccagccaagagagatggtgaatgaatgtgctacttagccgacaaaaccatgctttttccatggaactgtgcaacccacaaacggaaagatttcactcgtgaacccatgccacaggagcctagggtcccaaccccagagctgtgcagattctcaacaacctctcagctaaaatctgtttaagcctgctgagttcccaggggaggggtgaccagcaccacaggtgtggctgcctgctgtctaagccatctgagctccccggggaggggcagcaaccatctctacagctcctggcaggcttggttccaagaagtgtcccccacagcccaacacaccggctgtgccagactacagctacagcacctcttcaggcctgactctgacccatccctcctcattttgtggggccaccctgcaggaactccaactccagccaggggctcagggacagaactctgatctccctgggcctgagtccctaaggggagaagtgattgcagtctctgtgggaacagcagacttagcttttcctcctgttagttctaaggaatccaagcagcccagaggagtggttttaacttcagtgaagcataccccctccaccaagggacaataaaagtgcttcattaaatgggttctgttcctcgtgtcacccaatgggtgaaatactccaactggggttgtcagacactctatacaggagtgttcctactggcatcagattgttgttccttgaggtcaggcagcccagaggaaggagaaggcaaccatctttgctgttctccagcctccttgagtattatctccaggtgcaggagtgaaccacgtaaatagggcctgaagtgaacccccagcaaatcacagcaaccatacagaagagggacctgaccactgaaaaaaaacaaacagaaatgaacaacagcaataaaaaagtccccacactaacctcatccaagagtcagcagcctcaaagatcaaaactagacaaactcatgaagatgagaaagaattaatgaaaaaaacgctgaagccaggtgtggtggctcatgcctgtaatcccagcactttgggaggctgaggcgggcagatcatgaggtcaagaaatcgagaccatcctggctaacacggtgaaaccctgtctctactaaaaatacaaaaaattagccgggcatggtagtccgcacctgtagtcccagttacttgggaggccgaggcagaagaatgacgtgaacctgggaggcagagcttgcagtgagctgagatcgcgccactgcactccagcctgggcaacagagcaagactccgtctcaaaaaaaaaagaaaaaagaaaaagacactgaaaacccaaaaggcaagagtgcctcttctccaaatgattgcaatgcctctccagcaagggtgcagaactggatggagaataagatagacaaattgacagaagtaggcttcagaagatgggtgataacaaactccactgagctaaaggagcatgttctaaccaaatgcaaaaaacctaagaaccttgataaaaagttagagagaggagctgctaactagaataaccagttagacagagtctcactctgtcgcccaggctggagtgcagtggcgcgatcttggctcactgcaacctccgcctcctgggttcaagcgattctgctgtctcagcctctggagtagctgggattacaggcgcgtgccaccatgaccagctaatttttctacgtttagtagagatagggtttcatcttgttggccaggttggtttcgaactcttgacctcagatgatccccctgccttggcttcccaaagtgctgggattacaggcgtgagccactgtgcccagtcctattttgttaattttttcaaaaaacagctcctgaattcactgattttttttttttggagggtttttcatttctcggctgggcacggtggctcacgcctgtaatcccagcactttgggaggccaaggcgggtgaatcacaaggtcaggagttcaagaccagcctggccaacatggtgaaacactatctctactaaaaatccaaaatttagctgggtgtggtggctcacgcctgcagtctcagctactcaggaggctgaggcagaagaattgcttgaacccgggaggcggaggttgcagtgagccgagataatgccactatactccaacctggatgacagagtgagactctgtctcaaaaaaataaaaataaaagcaaaaacaaaacaaaactggcaaaccaaatccagcagcacatcaaaaaacatccaccaggtcgggcgcggtagctcacgcctgtaatccgccactttgggaggccgaggcgggcagatcacgtgagaacaggagttcgagaccagcctgaccaacatggagaaaccccgtctctactaaaagtacaaaaaattagccaggcgtggtggtgcatgcctataatcccagctactagagaggctgaggcaggagaatcacttgaacccaggaggcagaggttgcagtgagccgagatcacgccactgcactggacaacaagtgcgaaactctgtctcaaaacaaaacaaaacaaaaaaactgatccacaacaatcaagtcggcttcatccctgggatgcagggctggttcaacatatgcaaatcaataaacgtaattcatgacataaacagaactaaagacaaaaaccacatgattatctcaatagatgcagaaaaggcctttgataaaattcaactttctttcatgttaagaactctcaataaaccaggtgttgatggaacatatctcaaaatagtaagtgtgtttatgacaaacccacagtcaatgtcatattgaatgggaaaatgctggaagcattctctgaaaaccagtacaagacaaggatgccctttctcaccattcttattgaacatagtattgaaagttatggccagggcaatcaggtaagggaaagaaattaagagtattcaaataaaaaaacaggaagtcaaattgtctctgtttgcagatgacattattctatatttagaaaattctgtcatctcagcccaaaaactccgtaagctgataagtgacttcagcaaagtctcaggatacaaaatcaatgtgcaaaaatcacatgcattcctataagccaacaacagaccatcagagagccaaatcgtaaataaacatcacaattgctacaaaaagtaaaatatataaaaatacagctaacagggaatatgaaggacctcttcaaggaaaactacaaaccactcctcaaggaagtaagagagcacacaatcaaatggaaaaacatcccatccttatggatagaaggaatcaacatcatgaaaatggccatactgcccaaagtaatttatggactcaatgttattcccatcaaactaccattaacattcttcacagaattagaaaaaacaatgactttaaatttcatatggaaccaaaaaagagcccatatagccaagacaatcctaagcaaaaagaacaaagatagaggcatcacactacctgacttcaagctatactacaagactacaataaccaaaacaacatggtactggtccaaaaacagacatacagaccaatggagcagaaaagagacctcagaaataacaccacacatctacaaccatctgatattcaacaaacgtgacaaaaacaagcaatggggaaaggattttctgttcaataaatggtcctgagaaaaccggctagccatatgcagaaaactgaaactggacctcttccttacatcttatacaaaaatttactcaagatggattaaagacataaatgtaaagcccaaaaccagaaaaaccctagaagaaaacctaggcaataccactcaggacataggcatgggcaaagacttcatgacgaaaacgccaaaagcaattgcaacaaaagccaaaattgaagaataagatgtaattaaactaaagagattctacacagaaaaagaaactatcatgagagtgaaccagcaacctacagaataggagaaaatttttgcaatctacccatctcacaaaggtctaatatccagaatttacaagaaactttaaaaaatttacaagaaaaaaacaaacaattccatcaaaaactgggcaaaagctggaagtggtggctcacacctgtcatcccaccactttcggaggccgagatgggtagatcatttaaggccaggagttctagaccagcctggccaatatggtgagaccccgcctctactaaaaatacaataattagctgggcatggtagtggatgtctgtagtcccagctactcaggaggctgaggcagaagaatggcttgaacccaggaggtagaggttgcagtgagcagagattgcgccactgcactccagcctgggagacagaacgagactctatctcacaaaaaaaaaaaaaaaaaaaaaaaagtgggcaaaagatgaacaaacacttctaagaaggcatttatgcagccaacaaatatatgaaaagatgctcaataccactgatcattagagaaatacaaatcaaaaccacaatgagataccatctcacaccagtcagaatggtaattattaaaaagtcagaaacaatagatgctggtgaggctgtgaagaaacagaaacacttttacactgttagtgagaatgtattagttcaaccatcgtggaagacagtgtggtgattcctcaaggatctagaaccagaaatatcatttgacccagcaatcccattactgggtatatactcaaagaaatataaatcattctactataaagacacatgcacacgtatgtttactgtagcactaattacaatggcaaagacatggaaccaacccaaatgcccatcaatgacagacttgacaaataaaatatggtacatacacaccatggaatactatgcagccatacaaagaaatgagatcacgtcctttgcaggaacatggattaagctggaagtcatcatcctcagcaaactaacacagggatagaaaaccaaaaaccgcatgttctcattcataagtggtagttgaacaatgagaacacatggacacagggaggggaataacacaaaccagggcctgttgtgaagtgggggcaaggggagggcacctagaagggtcagtacatgcagcaaaccaccatgccacacatatacgtatgtaataaacctgcacattaactaagcactgcctctcaagctttaatgagcttataaatcacttggtaatgttggtctcactctatgtaatgtgattctgcaggtatggaaagggtccatgagtgggtgttttaaataagtcccgtcaaggctgatgttgctccccctaggctcattattagcattagttagagagcaggcacagcacagagtctcttacacttggcactcttgtcacaacacaattacttctgaaacaaatgacaaccaacctccatcttaaagtatcataatctttgttggctttttaaagtttacacagaaaacagaaagtagcaatatctgactgagtctgcatttatttttatttttatttttatttatttacttattgagtctcgctctgttgcccaggctagagtgcagtggcgagatctgcacttactgcaacctctgcctcccaggttcaagctgttcttctgtctcagccttccgagtagctggaactacaggcatgcgccaccatgcctggctaattttttttgtagagccaggatctcaccatgttggtcaggctggtctcaaactcctgacctcaaatgatctgcccatctcagactcccaaagcgctgggattataggtgtgagccaccgcacccagcccttgcttttgcattgtaagtacttcagcctgcaaataattaccttggataatcaagtttctgtcaaaggaacttactctgtatcttttagtctttatcattctgtattgttaaatttaattctacctttgtgtccaactttcatgtgctcttaaaatgagctttactctgaacaaatctgtgcgtacttttaatgaccgaaaattaaaaaaataaatctttgccaaagcaaaaacaaagctatgaatctcaggttacaaataaagacaattctgagtcaaaaagaatgataaaaggtttacttagctgttaatataatttacatatatttcaaaaaagcagagaaaaatatctacatataatctaaatgcgttaataaaacagagataaacaaaatatcctcccttattttcacatatgtgaataaagcctcttatttttaatttgcattttctcctaaaacaaccaggtcactggacatgttcttgaactcttggacatctgaattgtgaacttgaaagaatgtttatggtaaaaacgcagaagagagaaaggtgttataataaattgatgggtgcacacaaataaatcaagttgttagagaccgatgaagagaatgagatactgacacaataatagtgggagactacaacacccatgggcactaatagacacattattgaggcagaaaattaacaaagatattaagacctaaactcaacacctgactaaacagtcttaatagatttctacagaactctccatctaaaaagaacatagtatacagtcttctcatcattacgtggcacatactctaaaattgaccacacagtcagaagcaaaacaatcctcaacaaatttaaaaattccaaaattatatgaaccacacacagaggccacagcttgataaaaaagtaattcaatacaaagaaaatcacttgaattatacaagtacatggaaattaaacaacctgcacttgaattacttttgggtaaataatgaaattaaggcaagaaccaagaagttctttgaaaaaaatgagaacaaagatacaacatacctgaatttttgcaacacagctaaggcagtgttaggagaaaaatttatggcatgaaatgcttacattgaaaagttagacttcagtttaacaacctgacatcataagtaaaaggctgagagaagcaagagccaatcaacccctaagctagcagaagacaagaaataaccaaaatcatttctgaacggaaggagattttcacatgaaaaactatacaaaagatcaagaattgcaggagtaaaatcttaaaaaaaaaaaaaaagataaattctcaacaaaatattggcaaaccaaattgggcaggacatcaaaaacctaaccgactatgatcgagtagggtttatttttgggatgcaaggttaattcaacatacacgaggtggggcgcagtggctcacacctgtaatcccagcactttgggaggccgaggcgggagtatcacgaggtcaggagatcgagactatcctggctaacatggtgaaacctcgtctctactaaaaatacaaaaaaattagccaggcgtggtggcgggtgcctgtaatcccacctactcaggaggctgaggcaggaaaatggagtgaacccacgaggcggagcttgcagtgagccgagattgcaccactgcactccagcctgggtgacagagcgagactccgtctcaaaaaaataaaaaataaaaataaaaataaaaaaaaataataataatgagttatccatcacaaacccacagacaacatactgaatacacataacctggaatcatttttctttgaaaactgggacaagacaaggatgcccctcctctcaacactcctattcaacataaaactggaagtcctggccagagcaattaggcaagataaaaaaataaaaggcatacaaacaggaagagaggatgtcaaaacctatttctgtttacagatgacataatgccgtacctgaaaaaccctataatctcggcagaaaagcttttcaaactgacaacttcagtaaaatttcagaatacaaaataaatgtacaaaaattagtagcatccctgtaaatcaaaaacatgcacgccaaaagccaaatgaaaaacggaatccaattcacaatcactacaaaaagaataaaatatctaggactatagctaaccagggaggtcaaagatctttatgacaacactgtgaaaacactgcttaaggaagtcagagatgggccaggtgcggtggctcacacctgtaatcccagcactttgggaggccgagacaggcagatcacctgaggttgagagttcaagaccagcctgaacaacatggagaaaccccgtctctactaaaaacacaaaattagccagggtggtggcgcatgcctgtaatctcagctactcaggaggctgaggcaggagaatcgcttgaacccgggaggcagaggttgtggtgagcagagatggtgccattgcactccaacctgggcaaaaagagcaaaactccgtctcaaaaaaaaaaaaaaaaaaaaaaagtcagagatgacacaaacaaatggaaaaccattttatgctcatggatagaaaagatcaatattggccaggcaaagtggctcacacccataatcccaacactttgggaggctgaagcggctggatcacaaggtcaggagttcaagaccagcctgccaacatggtgaaaccctatctctactaaaaatacaaaaattagccgggcgtggtggcaggcatctgtaatctcagctactcgggaagctgaggcagagaactgcttgaacccgagaaggagaagttacagtgaaccaaaatcatgccactgcactctagcctgggtgaagagcaagactccatctcaaaaaaaaaaaaaaaaaaaaaaaagaaagcaagcaagaaagaaaagatcaatattattaaaatggtcatactgtcaaaaaattagatttgctatttttatcaaactaccaaaaacatttcttaacagaactaaaaaaacaaaacaaaacaaaaaaacttttaaaacttatatggtaccaagaaagggcccaaatagccaagccaatcataagcgaaaagaacaaagctgaagtcattacattacctgaattcaaactatactacagggtacagtaaacaaagcaacatggtactggtacaaaaacaaactcacagaccaatacaacagaatagagagcccataataataccacacacctacaaccatctggtctttggcaaagctaacaagaggaatctggaaagaattccctatttaacaaatgatactggaataactagctagcactatgtagaagattgaaactgaaccccttcattacaccatatacaaaaatcaactaaagataaattaaatatttaaatgtaaaacttcaaattatatatttaaaaagatccatgaaataccattctagacacagaagccggcaaaaattttaaaataaagataccagaagcaattgcaacaaaagtactaattgacaaatggaacctaattaagctaaaaagcttcttcacagcaaaggaaaccatcaacacagtaaacaaacaacacacagaataaaagaaaatatttgcaaactatgcttttgacaaaggtccaatatccataatttataagaaacttaaacaagtttacagaaaaaagaaaggcctcactaaatggtagacaaaaaacatgaaaaagatttttttttcaaagaagacacacatgtggctaacaagcatataaaaaatgctcatcactaatcattagagaaattcaaagaaaaaccataatgaaatatcatctcacaccagtgagaatggctagtattagtcaaaaggtaacagatgctggcaaggttacaggaatgcttataccagtgggagtgtaaattagttcattataaaaagcagtgtgacgattcctcacagaactaaaacagaattacctgttgacccagcaacctcaaaatcgggcatatacccagtaaaatacaaattattctattataaagacatacgcatgttcattgcagtactattcacaatagcaaagacatggaatcaacctaactgcttctcaactgtatactggataaagaaaatatggtatggctggccatgatggctcacacctgtaatctcagcactttgggaggccaaggcaggtaaactgcctgagctcaaaagtttgaggccacccagcggaacatggcaagaccccatctctacaaaaaatacaaaaaaaaaaaaaaaattagccaggtctggtggtgtgtgcctgcagtctcagctatgtggggggctaaagtaaaagaagattgcttgagcctgggaggttgaggctgcagtgagctgagatcatgccactgcactccagtctggacaacatagtgagaacctgtcttcaaaaataaaataaaataaaaggcttaggccaggcacagtggctcacgcctgtaatcccagcactttggtaggccaagacaggtggatcacaaggtcaggagttcgagaccagcttgaccaacatggtgaaaccccgttcctacttaaaaaaaaaaaaaaaaaaactacagacacacacacacacacacacacacacacacacacacacttagctgggcgtggtggcaggtgcctgtagtcccagctactcgggaggctgaggcaggagaacagcttgaacccgggaggcagaagttgcagtgagccaaaaccgtgtcactgcactccagcctgggcaacagagcaagactccgtctcaaaaaaacaaaacaaaacaaaaaaatttaagaaaaataaagtatgggccaggcgtggtggctcacacctgtaaccccagcactttgggaggccaaggcggacagatcatgaggtcaggagatcgagaccatctgggctaacacggtgaaaccccgtctctacgaaaaatacaaaaaattagccgggcgtggtggtgggcatctgtagtcccagctactggggaggctgaggcaggagaatggcgtgaacccgggaggcggagcttgcagtaaccgagatcgcgccactgcactccagcctgcgtgacagagcaagactccgtctcaacaacaacaacaaaaaagtatggtgtccgggtgcagtggctcacgcctgtaatcccagcactttgggaggctgaggcgggtggatcacctgaggtcaggagttcaagaccctgtctctactaaaaatataaaaattagccaggcctggtggtgcacacctgtaatcccagctacttggaggctgaggcagaagaatcgcttgaacccaggaggcgaaggttgcagtgagccaagatcgtgccactgcactccagcctgggagacaagagagaagctccatctcaaataaataaaatatggtacataaattatcataaaatagtgtgtggccgttaaaacatgcacacacacacatacacacacacacacacagatcatgtcctttgaagcaacgtggattaagctggagaccattactcttagaaaactaacacagcagcagaaaaccaaatgcatgttatttctaagtaatagctgaggctgggcacagtggctcacgcctgtaatcccaacactttgggaagccaaggcaggcagatcacctgaggtcaggagttccagaccagcctgaccaacatggagaaaccccatctctattaaaaatacaaaattagccaggcgtggtggcacatgcctgtaattccagctacttgggaggctaaggcagaagaattacttgaacccaggaagcggaggttgcggtgagccaagatcgcgccatcgcactccagcttgggcaataagagcaaaactccatctcaaaaaaaaaaaaaaaaaaaaaaaaaaaattaagtaagagctgaataataagaacacataaaaacaaagagggaacaacagacactgaggcgtagttgaggttagaggacaaagaggatcagaaaaagtacctgcttggtgctatgcttagtacctcagtgacaaaataatctgcacaccaaacccccatgacacaattttagctgtataacaaacctgcatgtgtacccctgaaccaaaaataaaagttaaaaagaataaaaatctatgagtgggaaacagtgcaatgcaggtggaagaactggtttgtgctacagatagcggctcaggtagaggtatactctgatggatttttgtgtttatgcaagcagatgagattatgaacaggtggtccagaaccctcagttggtggggaaaacagtttgctgttgcagattcagtgtctgggggttgggatatgccaggagacttgtagacacttttgtaggtttttgccaggaaacactagaatcaaaaatgctgttgtaaaatttctcagcatggtgcctagtcctgggagaggtctggacacattaatatctagtgggtatgctcgtgagtgagagggaatcctgtggttacagctgtgggaaaagggggtctgctgtcagagtttctttactctaagtttggatcctctctcatcctgggagacctggaatcacaggacaatgggcagtgtgacagcctgtgtacaggagagtagagcctcccattcccagacacccagagttttattccaggccaggcctctgtggtatcttttttcttgtaccaaatctgtagagtttgctgaacatcaagacattctccaacaccaactcattgtctaacatttgaatttgaattctgacaccacccagagtcagcacagaccctgattcagggctcattttcacaatattgtcctaattgcagatgccagtcacaaaccccataggcccatctatgcttctgagctactgtttaaaaattatggactcctgtaacctccctcaagtttcataatttgatagagctactcgcagaactcagcaaaacactgtagttacatttaccagcttataaaaaatataacccccaaaagagtcaaatgtaagaaatgtataagacaaagaaaaaaaatggggaaagatgaagcacatagataatcctggtaaatagctgtgattaataaaattctctatcctttgtgttctccagaaacagtttatggaaagaaacatgctttccattatgacttagttggtgctcttttttcttacctatcacatagccaaacaaagactgtgcacattttcttcttcttctaattttaaaaaatcagctggctgggagcagtggctcacgcctgtaatcccagaactttgagaggctgaggcaggtggatcacctgaggtcaggagttcgagagcagcctggccaacgtggtgaaaccccgcctctactaaaaatactaaaaaaattagccaggcattttggtaggtgcctgtaatcccagcttcttgggaggctgaggcaggagaatcgcttgaacccaggacgcagaggttgcagtgagtgatcgcaccactgcaccgcagcctgggtgacagagcaagactctgcctcaaaaaaaagctgaatttttcttcagtggtcaaaataaaatactttttaatcaaacttcacttaagtttatctccgccccataggctccttaacattcagctacactcaatctgagtcgaaatacaaccgcattttatgtccttcctaaggacatgctgagttcgaggtaaaacattaatctagaatctaactttttcaccctccatttgccatttccctcccactttcgttctaatcttgtttgttccttccttgtctgcctgaacttgcaatttttaaagatcttatagtaggcatttctttctgttacaatactcctttggaattcaatttttacattaatctaactttggtttattttaaatagtctagaaactgcttcaaaacaataacttcatcttcacaagaatcctgccagttcttttccttcttaaccttaactgcatctctctgtggggccccagttttccagggctctgtagcttctctcactataaaggtttcttccatggctgggggtgagcaggctgggacatctgcgagagaggctcttcagaaaaaaactaattgggccgttaataaccttcttttgtaggctcaatattaattagccttagcttggagtcactaggctcatgctttgatttccattgtcagagttactaacttggttttcaaaattacgtgtgtgaaaaattcagcaacattacttaaacacaatgttcatataaggggatgaaattataaggcgctttaattttatacctcaataagaaaagcaaaagtatcaattcctttcagacaatacatgtcttattatttccattaaaaatcatgtagtaaacaattagtcatatgggaccatttctaggaggtaccaagttttatctcataaaattaagcatgaaactcagaagtcaagataacaggatacagaacagagatattcactgtcacaaatttaccctgcaataaaatgaagtgatattagatgtgtaggctgggcacggtggctcagcctgtagtcccagcactttgggagaacgaggcaggcagatcaccaggtcaggagttcgagaccaaccaggccaacatggtgaaaccctgtctccactaaaaataccaaaaaaaaaaattagctgggtgtggtggtgcatgcctgtagtcccagctactcgggaggctgaggcaagagaatcacttgaacgtgggaggcggaggttgcagtgaaccaagatcgcgccactgcactccagcctgggtgacagagctagactccgtctcaaaaagaaaaaaagaaagaaaacagatgtgtctgactcatgggtcaattcagatcatccaaccacttgagagattctcccactccaacctgctcacttaagtgctcagtgaccactctcttaggagacagtgcactatgctcaagtgagtgccccaagtgtattttactttgcaagtttttgtactatctcactgaagtcaggttttttttctttcttttgtcttttgggatactattttttctttcacaaatcttagagcatttagggggcagaaattatttctgttttcccctcaatatcagcatgtgattggtggaccagcaatctgtctccaagaaatggaagctgggttgggtgaagacaattgtaatgtctcaaggggttagcttttcaaaggaagagtacaccaagagattccatcttttccccagggtatccactggggaggctgcactccctacctcaggttgtcctatgaaagaaaacgacttaggagctgatattcactagatactctagcagacatagccacagcagttatcttggtttattcagagacagtactaaaacccaggaacaagaaaaaacgacagggttgctgaggacaaatcactccataacgtttgcaaaataaaaacatcttgacactaaaacattatcataagacctttgtgcctagggaagacaaaagaaaaagaggcacagagactttttacaattcactatcaggggattattctttgctttcttctcatgggaaatacttacaaacagaaaacatatctttttctttttctttttttcaattttaaatagttttatttaagacattgcattttccacttacaatacagtgtttataaagtgcaatgctatttccttcccctgtgcatatgttccatattcaaatactgagaatgcccagtaacttactatagcagcttaactttttaaacctcccacagaatttgctacaaatttaggtccttcaaatgagaaaacatctttttcaatatgccatctaatgctttgtcaaaaaatgattaattaaaatacggtatataaaaggtacactaaaaaacaaataataaataatgtaaattagggagaggaagttggcatttgagattttcagaagaaactgaaaattcagtattttactgcaagccagagttaggctgcagaaatggggtgtggggggttgccttgagaccctgcttgggacccatgtgaaacatgcaagggaaaatcagtcccacgtggcggcaaatagactgaggtggctccaatccctggattcctaattttaaaaaatctaactcaaatgcatttttttaatagaaattactacattgggggaaacaaaattcaggcttaaaaaatgataaactgccaagtaagttctgattacacaaccaggaaatttctaggcttaaagtgaaaattaagaaactacgtaaatgtacctaaccgattactgaatttgggtattttcatcatgcatctttccttcaagatcttttcatggcccacaaactacaacccatagctgggagctctacaatttttgaaccgctccttgtttaaattcttaagtactgtcgcgataattcccatacatttttaataggcgaaaagaggaactaggaaccccataaaccaaacaaaagctctttccattcatgaaccctcacccccagcaccccgagtcaggattctgccgacgaccctctcgtggtccctgcacaatctgggagagacgcggcactgcgcgtgcagagctgcccagagagggctccagctcagggcacagtcactgggcagggaagagacaggacgcccggagcctggctgtcagcgcagccgccatcttatcgctgaaggggactgaggccgagctaggcaaggagaactaggggcacggattgtggagctgacagcggggaggcctgagtcccgccacagcctcttcccaccggttccaaccagccccttctcctctctagggatgtcggactcggcactctcaccatttctaggcttccaaggggtcctggcatcttagctgtggattcccaatacctgcaggtcacagggccacagaggctgggcctctacgagcagaggacacagaagggcgaagacgagaccaggaactccggctgcagcgagagacaaagaccccgccacatcccggaagccgccctttccgctccaaccgcgtgcctgattggacagttcccaggccagcgtctctgacttgttaacgtttaagatccctcgccctcacgccctgagtgacagaagatgtgaccaaatgctgggctgaatgaagaaagactgacagccgaaggtgcccccttttcaggcagggcttcctccctgaggtgagctaagcccacccagagggtgtttgccttaaaccttgtatataaggtctcatgtatttgtaaataatatactatacggctgctcacacatggaaagaatagaataacaattatttttaaatttctgctttttttttttttttgagacggaatctcgctgtgtcgcccaggctggagtgcagtggcacgacctcagctcactgcaacctccgcctctcgggttcaagcgattcttctgcctcagcctcccgagtagctgaaattacaggcgcgcgccaccacgccctgctaatttttgtatttttagtagagacggggttttcaccatgttggtcagggtggtctacgatctcctgacctcatgatccgcccgcctcggtctcccaaagtgctgggattacaggcgtgagccaccgcacctagcctgaatttcggcttttataaccttcctggctctggtcctttgaacaggcagcctgagatagtttttgttttgtgttaagatggagtcttgctctgtcgcccaggctggagtgcaatggcgcgatcttggctcactgtaacctctgcctcccgggttccagtgattttcctgcctcagcctcccgagtagctggaattacagtcatgcgccaccatgcccggctaatttttttgtatttttattagagaccaggtttcaccatgttggccaggctgaactcccaggtgatccgcccgctttggcctcgcaaagtgctgggattacaggcgtgagccaccgcgcccaactaacctgaggtttttaaaaggacacaatccttctaagtaaaatgtgagccacatgtgaattttaaatttcctactagccaaactttaaaaacaaggaacacacggggcacggtggctcacgcctgtaattccagcactttgggaggcgaaagcgggcggatcccgaggtcaggtgttcgagatcagcctgcccaacatggtgaaactccgtctctactaaaaatacaaaaattagcgtggtgtggtggcgggcccctgtaatcccagctactcgggaggctgaggcgggagaatggtttgaacctgggaggcagaggtcacagcaagctgagactgtaccactgtactccagcctgcacgacagagtgagactgtctcaatgaaataaaaataaaaatactttggccgggcgcggtggctcacacctgtagtcccagcactttgggaggctgaggcggatggatcatgaggtcagaacattgagaccatcctggccaacatggtgaaaccgcgtctctactaaaaatacaaaaattatctgtgcgtggtggtgtgtgcctgtaatcccagctactcaggacgccgaggcaggggaatcgattgaacaagggagttggaggttgcagtgagccaagatcgcgccactgcactccagcctgggcgacagagtgagactccatctcagaaaaaaaataaaaaataaaaacgctttttgatacgtgtgggctatttatgattttcaacactgattaaaagtactgtgcctgaaccaacctcttaccttaaaatcaaatgactatagacagacctgctaggaagacatttcatttctttcttactttttttttttatttttttagagtctggctctgttgctcagactggagtgcagtggcgtgatctcggctcactgccacctcaacctcctggcttgaagccattctggtgtctcagcatctcgagtagctgagaattcgggcgtgcgccaccatgcccagctgatttttctatttttattagagatggggttttgccatgtttgcaaggctggtctcaaactcctgaactcaggtgatccgcccacctcggcctcccaaagtgctgggattacaggcatgagccaccccgcctggcctgtattttgatttttaaaatagcagagctgctgttgaagatttcaaagtcagaagcagccgtgggacaaatctcagaagcacacgtggaaatcacacacagtgaatgcatccctcaccctgaaccaattgttttcacccaagtctgcatgtaaaaatcacctgggggggtctttaaaaatcccccaaacataagttgccacaccccaattaaatcaggattcctggagtggaaactgggcaacagtttagtttaattatctctaggtgatgacagtacagccaagctcaaatgcctctgctgtaaaccaacacttttagtgacctagttgcaaattatttctcaaatgaatgaaaaaatgtttgtccctaagtcatggcctttcagtcttaccaatattaccaaattattgttctttgcagaaccaactttactattggttttgttcctgaatcaacccagttccatacacattgaatgcactctatgtgcaaggcactgtgctaggtgccctggcattggtgatcattactgtgggggaagaattttctggaataaaggttgcattcccccaaaattaaaaacatgccatgaaccgaactggggctaaaataaaaagacgtatggtctcatttaagagttagggcttgttcgggtgcggtggctcaaggctgtaatcccagcactttgggaggccgaggcaggtggctcatgaggtcaggaaatcgagaccatcctggctaacacggcgaacccctgtctctactaaaagtataaaaaaattagccgggtgtggtggcacgtgcctgtagtcccagctactcaggaggctgaggcaggagaatcgcttgaaccagggaggtggaggcagcagtgagctgagattgcgccattgcactccagcctgggcaacaagagcaaaactccgtctcaaaaaaacacgttggagtggggactgtcagaagtttgcaccttatgcaaaggacacaatgacatacctagtcctgactggtttgtcgcaccttatgtaaatgaagcacctctcccgatcagcttgtttataaaatctcttgggcttttcactttaaaatggcaatcctttttcctgggagtcctctctgtgccagagagctttcttcctttcgcttattaaaattctgctctaacctcacctttggagtgtccgcacccttgatttcattggctctgagaccaagaacttcatgtgacatcccagataatgaggacagattcagtgccttctcaatagtgtcccaccagtgaccctcacagctaaagcacacatggggcagaaacatcaatcacctgcctgggacggccaggtgggcaggagcaagcagggactcggtgagaaaaccagaatgtgtgttcaagggcaggggccgaggattcagctgagttggaaaattccgtttctctttcagaatgtgctcctctcctggtatctgcttatctcctggaatctgagacacaacatagagcaacccccaggccagccatgactggagcctcccaagttgcagggaagggccctgtactaggccaagaacctatcctgaccagttcacccaccctgtccaccaggtgcaggcagaggccagggaccccaacttcagacagaggtaggcagcagggtcaccgcctccggcaatcccatgccagggattacagggtccctggggagacctagcagtggctgagttgagagattcaggcagggggatcccaggtgaaaaagtaagggactgggcatgtgtggggactaagagggaagtgtgtggctgtccctggagaagtgacagcaaggcacagacaagctgagtacccagatgccacacccaactgtcaggtacacaagccccagaatcccctaagcaaccccaggaagggttttatttaatcaagaaaaaaggagtcccacctccactcacacaggcactggtccttacatacattagagaacagaactcttgctctgcccaaggccagggaaagagggcaatgtctctctatcccgtgggtcacagaccttgtcctgccagaacacccaccctcagccccagaaaggtacagatgacaaccagggtgcacatggcaaccactggtgcaacccgaaaggagctgagtcctgtagggactttgggcctggggagtgcttcccagtcacagagtctttctaattgtttcactcactagctttgcccctcagtttcccccactgtggcaaaaagtcaaaattctatcctgcaggctaggggaccctgagaggtcaccacagcccattaaatgcctgcagcatgtgaaagtggggggcagtgagaggcctccctgccctgggtcttttgccctaggactgatttttatcaggccaaggccaggccagcctgctgaggaaggcaatataacctgcctggggaaccttgctcccaattacaggtcactacatttaaggacctccaatgcattagggcaggaaaagggtggaatgggggtagagcaacgcttcatcataaggggcttgggtcaaccaattgttttctcaattgagaaaaacaattcagactcctgtctgaagctgaccactcaaagagatttcgattttcggataagaaaaggcccttgggtcagaaaacaagatattctggttctggactctgcagctgtcttgggtaggggagttttgccagctttgtgctttcattgaggctaagggggtggcggggggggggcacgcggaagagactccgaagccaagggtgagagtcctgccttcctgcctccgcagcccactttccaaaagcagaggttgggcagcaaagtttcttaacaaagtcagaaaaaataatatccagaccaggcaggctaataaagtttaccaggattatccggcctaatcaccgaaacagccctgccatattcgtcctctgggacaggtgaggaaactgaggttggaggaggacaccgggagcctggccgggccactggcagcctggagccccagaggtccgggcattcaccgccctccaacaccccgccccccgcccccaacccccgccccttcttcccggcctcaggtgacttcattcccagctcattcacttgtcaataattcaggcccgcggggccaccagccctccctcaagcccccccacactcatcaggtgacgacctccctgtgtgtggctgccaggctgggggtgggggtgtctgtgcttccctcgcccaatctgagagtggcctgttccagggggcgggcttcctctttgtttggcagccaggagtctggagcgcaggtgccgggcaggcagcactgggagcgctcggcgacttggctggaggccgaaggtgccgcccctggggaaccagagcgcctttgcaaggtgggctcggcgtacactcccctatccttctgtggcccccgggcccctcctagaagaccgtcctcatctccgaggaccttgaccgccagcagccccacacccgctccctctgcctggcgttgggtgcgcacttctaggggcagacggatctaaggagcccagcgggcttgacaggcagtggggcctccagagactgtcaccgcgttatgctggccactgccgggcaggggctggtcttagctgacaccctcacctccgccctccagattccagcctctgactctggccaatctggccaggacctggggtctggggccgggacagtggacgcccctgggccgggctaccagctggggcctcgcacttggatggggaccttaaggctccaggcgccacacacaccagtgcgccctctctggccgtgaatttcagggaggggcggcagcagagcccgcgggctggcctggtggggacgatcaccttttcccacctagtcgcccttgccagtccccgcgtcgcctgcagggccgcccctcctccgcccgctggtccctccccacccgcagctctccagtcccgcgcggctcggtggccagggctccaaggcggggccgcccacgacagccactggcagggatagcgggggcaaatttcccagagcgggaagcctgccccagccggccctacggcaaagatggctctgaatccgagcccccgacacccggcccaacccacccctacagcaccctgcgtggctggctgccagcccgtcgggtacctgctcggtccctcgagctgggggccccggcagggcgggagcgatccaaggccaccgcgcggggccagagcccaaaccccaatcccagaccgcagggaccccgcccaccaggtaccgagacaggacggcctggcaggtggctggggaccggggtgtgtacctgtgggggggtcaaacaactggtcaaaagtggctttttgatttcccaaaggtaaaggctccttcgtaattatgtttttttttcttatttacttaaaacggatataatctagttagatttacccataattctgtcagtaaattcgagcacacttttattaatttttctcagtttaactagttcttttgtttgtttctatgttaagaattttaaattctacctgtaattagtagtgtgaattcaaaagtatctgagacaggtctcaatttagaaagtttattttgccatggttaaggacacacctgtgacacagcctcaggaggtcttgacaacatgtgaccaaggtggttggggcacagcttggttttatacattttagggagacaggagacatcaatcaatatatgtaacatgtacattgtccagaaaggtgggacaacgtgaagctgggtggcagcttccaggtcataggtagctaaaggacaaatggctgatttttgttttttttgtttgttttttttctttttttttagtttctgattagcctttcactgaatatgcaatttacagcgatagtcacttatgcgttagtctggcttagtgaaacaatagcgcaaagaaagcaatcagatatgcatttgtctcaggtgagcagaggggtaatttttgagttctgtctgtcctttgtacacagggattttttttgtgggcaaattgtgagggttgtctgtagcctttttctcttcatagttatcttatttggaaatagaatgggaggcaagttcccagattggcttttccttttggcctggtgatttgggggtccagagattcattttcctttcatatttcttcccttttctttttaaaatctttcagagaaagcattttagaaaaaaataagtcattggtttcagattttgcctgatctcttacggctagaacagtttattccgagaagggtaggtcccacattattaggaaagatcatttttagcaggttgtgaagtctcacatccttcaaagagaagcagggaaaggaagaaagaaaaacaataaaaacaaaaaaagcaagaataattttggaaaatcaatataggtcatattactctgaagtctttacatcaataggcaggtataaaggtagtttatgtatttaaataagttgttttctttttttcgaagtttaagtttgtctggcttcagtttgcagggctttaagaaagcacaacttaggttttagttatttgaaatcagaaaaaaaaaatgaaaaaagaaataaaaaaaggaaaaaaatgtttgagacttgtagccagggacattgtagaatttagtccaaactgtaaaaagtaataaaaattgcaaaaaaaatcagttaagaccagaaactaactacaggtgtactagagtttattctgacacagaatttttctctctttagtcccattttcactaaagacaaatcataggacgaactcacttgtaaaataagttttagtcttattatacttagccagagaatttgaatcaagtcagcaagaataattatttcccttataggctccactttttttcttatattggccttgctggaactttattttattatggaagctccgattcaactttaatgtcttaagcccatcatgtgcctgcaaatacctgtattagtggggtgaatatctcacctcatttaaagaatttaaaattgtattagtcttcttcaggcttcagaagcaatgctaggcttctgaccaatacataagctcatgtgggctaagcatctacatggagagtaaacacccatcagtcatgagaaacttcaaataagacagggcgtatgctatagaacttctcaaaacttgggaatctgaccaattctctgtgtttcagaacatcctgagacacaaactaaaagattaagcattattgactaaatcttgaaggctgcacatttgaatgctagctgacaatgtcagccactggcccgataatgtaagctggcagcctcctactgctctcttgaagtctcacctgtagagtagatgcactacccagggattcttctaactggaactccagatggctgttttttggaacttcccagcactgcttgatctggatgtaggtatcctcccgaacttggtgaatatatatgtgtatatacgtacatattttccttttctcccactttagcctttgctaagtttaccattatactgttttactacattaatcattaaacttttctcctaactgcatttgagtgtaatattgtggtttcttttgctcatgaatcctcaaacctatgatgaaagtaaatctttcagcaaaacacccccaggttacaaaaaacttgggctccttggcctgtcagaaagtggaattctttacttaccacaggtaaggaacctgcacaggaactgtgtagaagaggtgtaaggccagcttgttcgaagagcttatattatttctataagccaactatgataccttaaaggggtctgtatctgaaagcatgacattccaggcaataccttggtaaaacaaccagtgtctccaattgtgttctgttacaaaaaaaaaaatagattttttttttgagacagtgtcttgctttgtcaccatggctggaatgcattggtgcaatctcagctcactgcaacctctggctcttgcacttaggtgatcctcccacctcagctcccaagcagctgggactacaggtgagtgccatcatgcctggcaaatttttatatattttttggtagacagggggcatctcataatgttgcccggactggtcttgaactcctgggctcaagcaattcacccaactcagcctttcaacgggctgggatttacagttgtgagccactgcacccagtaagaaaatagatttttattgcacttaatgcaaataactatattgttataagttaagaatattcacaacagggcacagtggctcatgcctgtaattctagcgctttaggaggccgaggtgggtggatcacaaggtcaggagattgagaccatcctgaccaacatggtgaaactctgtctctactaaaaatacaaaaattagctgggcgtggtggcgcatgttagttatcccagctactcaggaggctgacgcaggagaatcgcttgaaccagggagtcagaggttgcagtgagccaagattgcaccactgcactccagcctagtgacagagcaaggctccacctcaaaaaaaaaaaaaaaaaaaagggaatactcacaactagttttcaaattttggagaaatcaggtggagagaattatgctccaaattttgtttataataatatattttactcaatctaattctctgttcaagttgccaagaacctggacaccctccactagtaacacttcctctatgctgcataacttttgtagtacagagttgtatgtcttttaaataatctacattatctgactttttccatgatacattttgtattttgtatccagttggaaaagcatttttattatctgtgcaaataaatatattctcacttattttcagctgataaccttagccacatatttttaaaatattttttaattatctgtaagatgatataataatcttactttatatgttctgagtgaacatgtaagtatctggacactatgtaatcaactaatttttataatacatttcaaatgcttcttttatcagacactctacttattttaaatgcatccttttaaaatacattctatgaatggataaaaaatgaccagatgtcataaatatatgcgaaggtaaatgtaaatgcaaatacacatctgtttagacaatgctgctttcaaaatcacagagaatggccactttttaaccttttattgtaattaaataaaataacagattttccatctttttttttttttttgagatagagtttctctgtcacctaggctggagtgcagtggtgagatctcggcccactgcaacctccacctcccaggttcaagtgattctcccgcctcagcctcccaagtagctgggattatagatgcccactaccatgcccggataatttttgtatttttagtagagacgaggtttcaccatgttggccaggctggtcttgaactcctgacctcaggatctgcccgcctccgtctcctgagtgccgtgtttacaagcgtgagccacagcaaccagcatgtttaggggttttaaaaagccccccgggtgatttttacatgctggctggagtaaaaacaattggttcagggtgggggatgctttcactgtgtgtgatttccatgtgtactgcagagatttgtcccatggcagcttctgactttggggtcttgaaaagcagctctggcattttaaaaatcaaaagacaggatgggggtggtggtttacgcctgtaatcccagcactttgggaggccgaggcgggtggatcacctgaggttaggagtttgagatcagcctgaccaacatggtgaaaccccatctctacttaaaatacaaaaattagcttagcctcagctactcgggaggctgaggttggagaatcacttgaacccaggagggggaggttgcagtgagccaagatcgggccactacactccagcctgggtgacagagtgagaacctgtctatagtcacttgatttcaagttaagaggttgtttcaggcaaagtacttttagtaagtgttgaaaatcataaatagcctacaaatatcaaacctggtttaactttttttttttttttttgagatgaagtctcgctctgtcgcccaggctggagtgcagtggcgccatctcagctcactgcaatctccagctactgagttcgagcgattctcccgcctcagcatcccgagtaggtggaattacagtcgcccaccaccatgcccggctaattttttttatattttagtagggacggggtttcaccatgtttgttggtcaggctgctctggaactcctgacttcaggtaatccagccatggcctcccaaagtgctgggattacaggtgtgaaccactgggcccagcctattttgagattttgtttttgtttttgtttttgttttgagacagagtctctctctgtcgcccaggctggagtgcaatggtgcgatctgggctcactgcaacctccgactccctaattcaatcgattcccctgcctcagcctcctaggtagctgggattacaggcacatgccaccatgcccagctaatttttgtattattagtggagacagggtttcaccatgttggccaggatggtctcgatctcctgacctcgtgatccacccgcctcagcctcccaaagtgctgggattacaggcgtgagccacggcacccagccctattttgagcttttgacataattgccaggcttcccgaaatcaaatttcagcttaaaaattgtcttctttttgacccttaacttttgggtgctacagagcaccaacgcagcatctaaaacaatgataaacagaattacttggtatgtttaattacatgggaagcattgtcaaattaaaaacactttttgggtcaggtgtggtggctcatgcctgtaatcctagcactttgggaggctcaggcaggtggatcacttgaggtcaggagtttgagatcagcctggccaatgtggtgaaaccctgtctctactaaaaataccaaaattagctgggcatggtggcccgctcctgtaatcccagctactcaggaggccgaggcaggagaatcgcttgaactcagtagctggaggttgcagtgagctgagattttcccactgcactccagcctgggtgacagagctagagttcctctaaaaaaaaaaaaaaaaaaaaaacccaagaattaaataaaaatgatgtttgaccttcaacttatattttaataaatatgtgattaatatttatatcaaaatcatatgaaatttcaaaaattttatgtatctgagtatattatagtagtcataattgtgattttgataaattattgtaggccacagatataatcaatttttgtttctttataaccattttaagttatttccacagttaatggtttaattctgatgtagtttctaaaaacctcaaaagcttgcaaaatcctagagtattatgtctttaaggaggttcatgaaaagttggaaaaggcccacacaaattgagtacaggtttctgaccattttaggatcatattatttattctggtaaggcttgtgagaattctaataaacagaccaattcttataaaactgctaacctaggcaaatcaaaagtatttgaatattaggaaaatactctgtgtaaaataatgtggcagagtattttaagatattatgctaaaacagcctgtacaaaaattttttagatataccattttagtaaactctgtggtctaagtcaaactacctatgataacccctcagttatcagagctatgctcctaaattggagaaacaaacctagtatttaagaggacataaatttaatgttaagtgtggactcattaagaacctagacagccaacagccacttactcattcctgagttcttaaaacttccattcttaacagctctgcattccattactcatcacagaagagataaaataatctaaattgaatataaattaagtgtgtgtggtgattattctataataaattacgaaaataggttaagaccaatgttttcttatcaaacatttaatcctgagaagacaatcaaaacttcatgtatgtttctgctacctgatgggccatttaatcatggttacaaaaattttattcaattatcatttttaatacatattttctggtaatataaaagctttcttatgcaagaaaactgatgttataacagtagctaaaaggatataaataaatacatttttctcatggaacatttctgaaaaagcctccaatgataaagatgtttatttcactagacaaattgtaaaactgttacataaggaattacagatacaatagtattgtgcaaagctaactacattgactggattgcttttgtaattgcagattgatgacaatcagatccactgagagaggaaaaaatatgttgtcctggtgggtgtggttgctcatgactgcaatcccggcactctgggaggccaaggtgcgtggatcaggttaggagttcgagcccagcctggccaatatggtgaaaccccatctatacgaaaaatacagaaattagtcgggcatggtggtacgcacctgtagtcccagctatttgggaggctgaggcagaacaatcgcttgaacccgggaggtggaggttgcagtgagccaagattgtgccactgcactccagcctgagtgacagagtgagactgcatctcaaaaaaaaaaaaaagttggcccatataatatactcattggaaggcctatgcacctaataaaagctcatgtatcttctgctactgaagtccagtgttttttgttttttttttttaatttactttaagttctgggatacatgtgcagaatgtgcaggtttgttacataggtatatgtgtgccatggtggtctgctgcacctattgacccatcttctaagttttgcacccttgcccccaacctcccaacaggccttggtgtgtgttgttccccttcctgtgtccatgtgttctcattgttaaactctcacttatgaatgagaacatgaggtgtttggttttctcttcctgtgtttgtttgctgaggatgagaccttccagcttcatccatgtccctgtaaaggatattatctcattcttttttatggctatgtagtattccatggtgtatgtgtaccacattttctttatccagtctatcattgatgggcatttgggttttccatgaaagtctaatatttctttttttttttagacagagtttcactcttgttgcccaggctgaagtgtaatggcataatctcagctccctgcaaccttggcctcctgggttcgaccgattctcctgcctcaacctctcaagtagctgggattacagacgcccaccacaatgcccagctaattttttgtatttttaggagagatggggtttcaccatgttggccaggctggtctcaaactcctgacctcaggtggtccacccacctcggcctcccaaagtgctaggattacaggcgtgagccactgctcctggccagaagtctaatatagcatattttcaccaagtgaagaaagtcttgaacagtctattgactgaggatagtagaaccctttataatctagaatccagagactgagtcttactgccatctaccctgaagcaagacttcaagaccttgaacattgggttcatagtctcacaacttagaagggcctatccaaactctttcaattgtaaactcataggagatcttaagcaaaggtaagcaggaaagtttctcctcaaaagaagatagcaatcttgatctagacagctttctttataagatcaaaaatcaaggccgggcgtggtggcttacgcctgtaataacagcactttgggaggccgaggtgggtggattacgaggtcaggagttgaagaccagcctggccaacatggtgaaaccctgtctctactaaaaatacaaaaattagcaattagccgggtgtagtggtgtgcgcctgtaatcccagctactcaggaggctgaggcaggagaattacttgaacctgggaggcggaggttgcagtgagccaagattgcaccactgcactccagcctgggcaacagagcaagactccatctcaaaaaaaataaaataaaataaaaagtataaaaattagctgggcattgtgacacgtgcctataatcccagctactcaggaggctgaggcaggagaattgcttgaatcaggatccaggaggcggagtttgcagtgagcggagattgcaccactgcactccagcgtgggctacagagcgagactccgtctcgaaagaaaaaatcaagacatctctgctatcatagcagagtttgttcacagttttctaatggctctacaaacaacagaaataaaaaaggaatctcttgtatgcactcatggggtatactcataggtagagaattttgctgacaacattatatataacaaaacttttgccttgataggtaaaagatgaagagctaatgtgggtgagaagttttaatgaaacatttgttgcctcataatttcagaaaaagaatatcgatccactgctttaaacttacttcataagttaaaaataacttcttcagaatgggttaaagagcattgccagcaggccattactcttctgaatgggcatcatttgttagatcattttttccatggcttagcataaatgaagcaatggtaagaaatttatccccaaaaatagggctctatagcagattctaatgtaaagactatggttacgcaacaggtgttaaatgttgttactaaagttgtgctaaataatagaatttcttttgattacttactggataaacagagaactacctgtgctgttgctgatacttgtagttgcacatggtagaatacattgggtattacaaagatgcaattgtaggggattaatgaacaggctgcttggttgaaatgagatcatttatctagctaattatttaatctattgaattttagttggttgttcatggggaccctggctaagaagcatggtttcaacattttttttttttttttctgagacaaagtcgcactctgtagtccaggctggagtgcagtggcataatctcgactcaccgcaacctccacttcctgggttcaagtgattctcctgcctcagcctcccgagtggctgggattacaggtgcacaccactgcacctggctaatttttagtatttttagtagagacggggtttcaccatgttggccagggtgatcctgaactcctgacctcaggtaatctgccctcctcggcctctcaaattgctaatattacaggcatgagccactatgcccggctggtttcaactcttggtattatcctcctgaaaatcaaaatagtagtctccctactgcaccgtattctctcaaaagttctaaaggtttgcatacagtcatctctagaatgtcaaatggtgtctttttaatgggaatgacagaaactcaaagacatatgtgactatgaagacaccataacctgtgaataacattataaggacaaaaaccctaaataatggaaattgagagtggcactaaggccctgagttttggtcacactctgacctacgtaagaactttaccaaaaagggagagttttaaaaacaaagttggctcagcgcggtggctcacacctgtaatcccagcactttgtgggccgaggagggcagatcacaaggtcaggagatcgagaccatcctgccaacagggtgaaaccctgtctctaacaaaaatacaaaaattagctgggtgtggtggtgcgtgcctgtaatcccagctacttgggaggctgaagcaggagaatggcttgaacccacaaggcagaggtttcaatgagctgagatcacaccactgcactccagcctggcgacagagcgagactctgtctcaaaacaaaaagttattggagtccatcattgtaaactgagcttgtgcactagttccaaacagaccaaaccaaactgaaccaaaacaagtcacttgtgctaaatgtgacataatcaaactgaaaatttaagaaaataggtagatcctaaaacaggccaggtttatatttttcttctggaaacagcagatttcaacacaaggaagccccttctaaccttttaaaaataaataataggcctggtgcagtggcttatgcctgtaatcccagtactttgggaggctgaggcaggcagatcacctgaggtcaggagttcgagactagtctggccaacatggtgaaactctgtctctaccaaaaatacaaaaattagccagcagtggtggcaggcacttgtaatcacagctacttgggaggcccaggcaggagaattgcctgaagccaggaggcggagtttgcagtgagccgagatcacaccattgcactccagcctgggtgactgagcgaaacttcatctcaaaaaataaaaacacaaataaaataaaataacctgaatccatgtttccacttaaaaaacccccacagttctgcttttttacagtaggatttgacactaaataagtaaatttttatttttattttttgaaacagtcttgctttgttgcccaggttggagtgcagtggcgcgatctcggctcattataacctccgcctccccagttcaagtgattctcctgccgcagcctcccaagtagctgggattataggcacttaccatcatgctcggctaatttttgtatttttgtagagacagggtttcaccatgtgggccagcctggtcttgaacgctgaccttaggtgatctgcctgcctcggcctcccaaagtgctgggattacacacgtgagccaccatgccaggccaataagtacatttttgatggtgacggagtgatattaatatctaaagttggtttttttttttttttgagatggagttttgctcttgttgcccaggctggagtgcaatggcgcgatctcagctcacgcgcaacctctgcctcccgagttcaagcaattctcctgcctcagcccctctagtagctgaaattacaggaatgcaccaccatgcccagctaatttgtatttttagtagagacagggtttctccatgttggttaggctggtcttgaactccagctcaaaaaaaaaaataattatgggagccaccacaaaaatattaaagaatttaatcaaagagagttgttcaaaaattatagagcacccctatgggttgtagtttgtggtccattgcaggggctttaagaaaagacttttataaagtgcatgatgaaaaaatccaaattcagtaatcagatatagttacgtagtttcctaatttccaccttgagcctacaaatttcctggttatgcaatcaaagcttaattggcagattatagttggttaaacttgaattttgtttcctctaatgtagtaatttataaaaaatcgaactcatttgagttcgatttttttttaaataggaatccttcttttctcttctctcttctcttcttttctttgcttctccctcccttccttctttctttctttcttttttttgagacggagtttcgttattgttgcccaggctggagtgcagtggcgcgatctcagccaacggcaactccgccccccgggttcaagcgattctcctgcctcagcctcccgagtagctgggattacaggcacccgccaccatgctcggctgtttacatgtttttcaagcagggtctcgaatgtaccccccaataactttttttttttttttgagatggagtctccctctgttgtccaggctggagtgctatggctcaccgtaacctccgcctctcgggttcaagcaattctcctgtctagcctcaggagtagctgggattacaggcgcctgccaccacgcccggctaatttttttttttttttccagatggagtctcgctcttgttgcccaggctggagtgcaacggtgcagtcttggctcactgcaacctccacctcccgggttcaagcgattctactgcctcagcctcctgagtagctgggattacaggcatgcaccaccatgcccggctaatttttgtatttttagtagagaaggagtttcaccatgttggtcaggctggtcttgaactcctgacctcagatgatccattcacctcagcctcccaaagtgttgagattataggtgtgagccactgagcccagcctttttttttttttttttttttgagatggagtctctctctgtttcccaggctagagtgcagtggcataatctcagctttgcctcccggggttcaagcaattctcttgcctcagcctccccagtagctgggactacaggtgcatgacaccgcatccagctaatttttttgtttttgtttttgtgtttgtgttttttttgagttggagttttgctcttgttgcccaggctggagtgcaatggtgggatctcagctcaccacaaccttcaaatcccgggttcaagggcttctcctgcctcagcctcctgaggagctgggattacagccatgcacccctacgcccggctaattttgtatttttagtagagatggggtttctccatgttggtcaggctggtctcgatctcctgacctcaggtaatctgcctacctcggccttccaaagaaagtactgggattataggcgtgagccatcatgcctggcttttttttttttttgtattttagtagagatggcttttcaccatattgggcaggctgatctcgaacttctgaccgcaggtgaattgcctgcttcagcctcctgtttttaatattttcatcataaaatctttgtcagtttctatgtctagaatggtatttcctaggttgttttccagggcatttcttccttataattttaaattttacatttaagtcttgaattcatcttgagtttatttttgtatatggtgtaaggatggggtgcagtttcaatcttctacatagtatttgctagttatttcagcatcatttattaaatagggaattattcccgcattcctcttgtcagccttgtcaaaaatcagatggttgtaagtgtgaggcattatttctgggctctctgtcctgttgcattggtctatgagtctgcttttgtactagtaccatgctgctttggtgtctatagccctgtaatatagtttgaagttgggtaatgtaatgcctctagctttattctttttgcttaggattaccttggctgtttgggctcttttttggttccatatgaattttaaaatagtgttttttagttctattaagaatgttgctgggtgtggtggctcacgcctgtaatcccagcactttgggaggccgaggtgggtggatcacaaggtcaggagattgagaccaacctggctaacacagtgaaaccttgtctctactaaaaatacaaaaaattagccaggcgtggtggcacccgcctgtagtcccagctacttgtgaggctgaggcgggagaatcacttgaacctgggaagtggaggttgcagtgagccaagaccacgacattgtacttcagcctgggtgacagagtaagattctgtctcaaaaaaaaaaaaagaaaaagaaaaaagaaaagaatgtcttggtagtttaatagaaatagcactaaatctgtaaaaaaattttaggcagtatggctattttttttttttttttttgagactgggtctcactctgtggtcaggctggagtacagtggtgccgccttggctcacggcaacctctctctcctgggttcaagtgattctcccacctaagccttcccagtacctgggactacaggtgtgtgccaccacatcatctaatttttgtatttttttgtagaaacggggtttcactatgttgaccagcctggtctcaaactcctgacctcacgtgatccagccacctcagccttccaggctatgaaacagttttccatttgtttgtgtcatctctgacttcttagcagtgccctgtaattttcgtcttagagatctttcacctccgtggttagctatattcctagatattttattctttttgtggcaattgtgaatgggattatgtttttgatttggcttttggcttggatgttttttatgtacagggatggtactgatttctttacatttattttttatcctgaaactttgctgaagttgtcagtttaagaagcttttccaggccaggcatggtggctcacacctgtaatctcagcaccttgggaggccaaggcaggtggatcacctgaggtgaggagttcgagatcagcctggccaacattgtgaaacccgtctctgctaaaaatacaaaaattagctgagcatggtggcgcatgcctgtaattccagctactcgagaggctgaggcaggagaatcgcttgaacccaggaggtggaggttgaagtgagctaagatcatgccattgcactctagcctgggtgacagagcaaaactctgtctcaaaaaaaaaaaaaaaaagaagaagcttttctgcaaagattatagggttttctagatatagaatcatgccatctgaaaacaaggataatttgattttttttttctttttggatgccttttatttctttctcttgcttgattgctctggccaagacttccaattctatgttgaatacaagtggtgagagaaggcatccttgtcttgtgccatttttcaagaaggaatgcttgcagcttgtgtccattctgtatggtatctatggatttctcataaataactcattattttgaaatatgtgcttttaaggcttttagttttttgagggttttaaacatgaaggatgctagattttattgaaatatttttctgcatctattgaaataatcttgtgattcttgtatttagttctgtttatgtgatgaatcagatttattaatttgtgtgcactgaaccaaccttgcatcccaggactaaagcctaattgatcatagtgcattagctttttaatttgctgctggatttgctttgccagtattttgttgaggatttttgaagcaacattcgtcaatgatattggcgtgaagttttcttttttgttttgtttctatcaggttttggtgtcagaatgatgttgttcttacataatgagttaagggttaagggggagtcccttcttttcaatttttaataatagttatagaaggtataataccagcttttcttcgtacatctgctaaaattcagctgtgaatctgtctggtctttttttttcccctgtttttggttggtaggctatttactactaattcaattttggagcttgttattggtctattcagggctgcaatttagtatttttttagtcttgggagagtttactcatccaggaatttattcacttctttcagattttctagtttgtgtgcatagtggtgttcatagtagacttcaatagttatttgtatttttgtgggactcaatggtaatgtcccttttgtcatttctaattgtgtttatttggatcttctttcttcacagtcttgctatggttcatctcattattttttccaaaagatttaactcctggatttcttgatactttgtataacttttcatgtctaaatctcgttcagtgcagatctgattttggttatttcttgtcttctgctagcttaggggttggtcttctcttgcttctctcattcttttatttatgatgttaggttttaaaatttatttttaacttttttatttgagtttttagtgctataaagttttttcttaagactgccttagctgtgttgcagagattctggtaggttgtatcttcgttgtcatttgtttcaaagaacttcttgatttttgccttaatttcattattttcccaaaagtcatccaggttcagattgtttaatttccatgtaattatatggtttcaggtggtttcctatatattgaattatatccttatcaagctgtggtctgtttgtgtttttggtatgattttgggaagactgaatttgctgagaattgttttatttctgatcatgtggtcaattttagagtatgtgacacgtggtgatgagaagaatgaatacaatgttggttttagatggacacttctatagatgtctagtaggactatttgatcaagtgttgagtttaggttttaaaatctttgttaattttctgcctaataatctgtctaatagagtctgtggggtgttgtagtctcccactattattttttcagaatctaactctcttcataagtctctaagaaattgctttatacatatacacccatgcattttttagaacacttttctctcttctgcttttttgtttttgagatggagtctcactctgtcgtccaggctggagtgcagtggtgcgttctcggctattttttatgtttttagtagagacaaggtatcaccgcgttagccaggatggtctcgatttcctgacctcttgatccgcctgactcggcctcccaaagtgctgggattacaggcgtaagccaccacgcccggatataagcattctttcaagtgcacacacggtatgcccaaggctgcttcttagatgtctgaatacagtgtctaattaaattcagatgtccaagagtttaagaacatgtccagagacttggctgttgtaggagaaaatataaattagaaataagaagctttattctgttaactgaaaataagggaggatattgtgtttctctcttttcttaaagcatttagattatatgtacatatttttctctgcttttaaaaaatatttgtaaatcttttttgttgttgtttgttttgttttgttttttgaaatggagtcttgctctgtcgcccaggctggggtgcagtggcacaatctcagctcactgcagccaatctctgtctcccaggtttaatcaattctctgcttcagcctcccagtacctgggattacaggcacccgccaccacgcccggctaattgttttgtatttttagtagagacggggtttcaccatcttggccaggttggtcttgaactcctgaccttgtgatccaccagccctggcctcccaaagtgctgggattacaggcgtgagccactgcacctggccaatatttgtaaatcatatttacagctagatcaatcttgtggttttttgttttgttttgttttttactcagaatcgtcttaattgagaaccacagaaccattgctttgtttttgctttggcaaaagtatatacatatatatatatttttttttagtcttttaaagtagacatagatttgtttagattaaagctcattttaagagccacaaaaattgaacacaaagataggattacatttagcactacagagtgatagagattaaaagatgctgagtaaggttctttgacagaaaattgataatccaaggtaattatctaatatttgcaggctgaagtacttacactgcaaaatcaaaaaccgttcagtgtataaactgaacagtggagtctgtagttgtatttggtttcgatttattacttcagaacaattagcatagttatttgtagtgtttgtagacaacttgcattcatataaattatgcagtattttctacaatagtatgaatatgacacaatatttagtaaatttttttttttttgagatggagtctcactctgttgcccaggctggagtgcagtggtgccattttggctcactacaacctctgcctcctcggttcaagcagttttcctgcctcagcctcctgagtagctgggattataggagcacgccaccacgcctgggtaatttttgtatttttagtaggtacggggtttcaccatgttggccaggctggcctcagactcctgcctcccaaagtgctgggatttcagatgtgagccaccatgcctggccacaatatttactttcaatgagtttcctttatttttttttttttttgaagcagagtcttgctctgtctcccaagctggagtgcagtggcacaatcacggctcactgcaacctctgcctcccaggtacaagcgattctcctgcctcagcttccccagtagctgggattacaggcgcgcaccaccatgcccggctagaatttcttaaatagttattttaatattgttattcatactttttaaatataaaatgttttaactgaattatggttacaagtaatttttaataattctacattatgactagtacattaaaattatttatccttagatatttatatctaatatccaaagaaaattcactacaaaattgttgtagtagatatgagtctgacatgcttattagtttatccaatagggataattataggtaagcatgattttaatgtctattatgtcactaaatttgaatgctgctattacaggacaagcaaacatgacaagtgatgtggccatgccaagattgtaatagctcttcagttagctatgctgcaagctcaaatatattccagtgtgtaaacaaagccagattcaaattcttcatctaatgtgctagtggaaattgtcagatgtgtttcaatatagttcccccatctaatggttaggagatgagacagcagcagagatgaaagagaaaccttataaaattttgctgagaatttgtaccccctgctttttttttcgagacagagtcttgctctgttgcccaggctggagggcagtggcacgatctcggctcactgcaacctctgcttcccaggttcaagcgatccttttgcctcagcccccctagtagctgggattacaggcacgcaacaccaggcctggccaatttttgtatttttagtagagacggggttttgccatgttggccgggcaggtcttgaattcctgtcctcaggtgatccgccctcctcagcctcccaaagtgctgggattacaggagtgagccaccacgcctggctcatcccctttttaaataatgttcatgtttctcatgctgagaatagttgtgcactttgggtatttaaagagaaatttttaactttttattttctctcaatataatcttgctcagatagagagctgttttttgctcaaatcctttgggtgtctgtttcaggggtcctattagtatcccatggtgtctgtgaataaggtgggctgtcacagggagaattcttagatctatctctatctggactcatgctggaaatccagcagtatttttttcatgtcaccattataaatagaagctgaggctgaaacactgctcccattcccattatcgtgaaggtgcaatttcacccaggaggcctgcaggctctcctcctgcagctcaggcttcattgtctgatgggacgctggagtgctgctgtggcaactggggttcatgtaagatgtgagctgccagtgacaagctttatgttgtggcctctgcgtcagtggcagatggtaggcgtcaagagaggacatggccatcaggagagggcaagcagggtgctctagcccagtgctaaaggagtaaagagccattgctttaaaatataaatagccaaaaagataacaccctattcaaccatttctgtaggagagtgggagcctaccttcagcaggcacctggcttcaagttgcaaaattacctcctgttatgaagatgtgaaaagtttattttgtcattgaatataaccaattagcatacacggatggccttgccaattaccagcggaatttaggatgaactacgtatgacatggtgctgtaaatttttctacttgtggactaactatggtgactgtctttctgtctttgcaatctgttgagcagattgactgtgatgcgtgtcacattcaggttaaattgtgtaataaaacagttttctttctgttctctcattttggagattttctggggctggagaaaatttttcttttaattatattttccatacactgtctagaattagcagacatgatataaacacatgccaaccaagctttactctagagaggatttttcctctcaggcttccagtcagctcatacatttctacaaacttcacaggatggcaatcaaccatttcacctctttcagtgactcttgtatcttcagacctgaaactaattcagagaccagggggcccagaaacccaatcagagtaacatgtgagtgttgagtagacatgtagatatgagaatctccactttccccttcctcctattgctaaaatacccacaaatatgcaaataacacctgctgaagctccaaattctaaatctaggtcttgagatttggaaaacaaaaaaaaaaacaaaaaacctttcatctgaggaatgcaagttcttttagttgtcaaactcagagagacattaaaatgacaacacagttttgtctttttcccatctttaaattatgtgttttttttttttttttttttgagacagagtcttgctctatgaccaaggccagggtacagtggtgcgatctctgctcactgcaacctccgcctcctgggttcaagtgattctcctgcctcagcttcccaagtagctggaattacaggcacgtgccctggctaatttttgtatttttagtagagacagggtttcaccatgttggccaggctggtcttgaactcctgacctcaagtgatccacctgcctcgacctcccagactgctggaaaattacaggcgtgagccgctgcgcccggccctgaattatgtatttatctcttaaaactgttagctactgccaccaatagctataaattaaactaataatgccacactggacactataaccatactctaaattttaacgatgtatatccaatcaataatcaatgtcatttctgtaaattaatgaaaatttctgataaacaattttatatcagccatctctctgtccttctctttttgccttttcggatcgacttataactgctcctaatcaaagtgtagatgacctgcaacttgaaggtttgctcccaggttacaatcctcaagctttgcctcaataaactgtctacttatattcatgttgccttagctttatttcttttaggtagacatatcatttagaacgtgctaaagcagcctctataaagggatctttcctttgattgtactctgcttgctgtaacacccaagaatgaaaagccaggttgatcccacctagaatctgtaaataaggtctggcgtcttcctggaatttataagataaggccagactttgaattgagaatgtagaaaaaaccaacaagagacattttctgcattgtcagatgtcaacatagacatcttaaagttcccctttgagaatgtgattctttcagcttctcagatcttgtccggtgacatgctacagttatgtaaggggcatcaggtataaatagaatctgatggcagaatatgtaagtgtgaacaagtatcttcagagtgagagatcaagatgataatgtatccagagccataaccaaaactatacctacctataaaatgtgggactggagtagaatattcctgttcttcctcttacctaagagctagataatcaggacaggtgatccagattctcgagcttctccagggcagtttaattttttatttagaattagcctgagtcggccgagcgcagtggctcacacctgtaatcccagctctttgggaggtcaaggtgggcagatcacctaaggtcaggagaccagcctggacaacatggtgaaaccctgtccctactaaaaatacaaaaattagccagacgtgttggcatgtgtctgtaatcccagctactcaggaggctgaggcaggagaatcgcttgaacttgggaggtggaggttgcagtgagccgagattgtgtcactgcactctagcctgggagacagagcgagactccgtctcaaagaaaaaaaaaaaaaaagaattagctaattagcttgagtctctcctgcctggcttatcattgggccatcagcccagggtcactgggaactctcacaatcagctgggtgtctttgagacatttgagcacgtccggagcagaattgtgccaggttaacaaaagtggttaattctgcttgtctcagtgtaaaaattgagtcatcctgtgtttgctccttccctcacacaagagatgactttggtgggtacccagatgagagtttctccagttttctggtacttgggtgaaaaacaaccaggatgtctggagactcaaacgaataaactaattgcttttatttcatatggccattagaaaaatagatgaagcagtcatagttcctaccatccaggaacttttagtctagactagcacctgaataaagggttgaagtaagcatcgtatggttgatacaatgaacagatgtgtgcaaaaaaccttgggctttatctgggcccctttctttatcttgtagtgacttcttatgtcatcaactaaagggatatttatgaaaagaagagttgttattattacatgcatttctattacctaagaatatatatttatcttctaataattaccctagaaagccttacgatatttatttaaattgcttattagtatgcattatataatcgacagggcagtggctaaaaaaaaattatataaactctgagatataagtttctcttaggcaagcttagggaaacacaactggaaataccccagtggcacagagaacagaattctacataaggtccactccctgcccagttctgttcagattcactctatttgagggtcttatttagatctggccccactctggagtcttgcctcacagaactgattggaagagatcagagttttggctggtgaatcctgctgcctttctaaagctggtactcacaattttctgcaccccgaaggagataaatgggaaaaataaagtatatattttaaggtcttcatttttaaattttctattaaatcagtgcttgcagagacattccatttagcaacttgttttctattcctgcagattcagtagttgctccacaagtcacaaaaaagcaaatataaaccacaataaaagtttctctaaactgcattaaacttttctgtattccagtcatctgtctacatttagcttttattgtatacattttctttaaaaaaccaagaacagaaacagaagatgaaatacatatgctgggcccttaacctaatgctgggaattatcaaacacttagtaccaactcccagtgtgttatgaggattaaatcacataatgcattatttctagcgcagtgctctgcaacatactcttgcttacctagtacctgcttagtaaacattgcattagtccatgtgtacatgttgttttccaaatgcaggcttattcaggcactgctaccttttgttgcctctgtaaactttaaagagccagcgaagaatttgatgctttaggatggagattagttgtcttcatttgtgccagaagtatttgtgttgtgacaacagtgccaagtataagggactctgtgctgtgcctgctttctctaactaatgctaataatgagcctgggggagcatcatccgcattgacaggggacttatttaaaacacacattcatgtactctttgaaaacctgaagaatcacattacacagaaagagattaaaattaccgagtggtttataaactcattaaagcttgagagacaatgcttagctaagtggttataaacccagggttctattagtttggtgcaaaagttattacagtttctgccattgtaattaatgtggattacttagatgtggatactcagattacatggccaattcacagaaatatctttgctcgtgccctttccacgggttctttttattgttggacacatccatgttgttttaattaagagcctcatgtgattctaaggtgaggccagaatcacgtatgaggggttgaagatacactcatgagagttcagtttcacctctttactacagggtgatcatagggcctgttctgtttggttttggtatggacagggcagtgtggcccatattttcattactgtagcagagattgttggtatctgtgccagggaagggcacctaagacaggaaaggagaaacacatatttctataatcatggagcaactaattgttcctgaatttttcatgttataaaggacagaaatgggtggactttttcagcgggtcttggtacttctgcctgtgggtgtggtggtagcaggtaaacaggtggtgctgacacctttaaaggcatattctcaagatgcaggtctaatttgtccagagaatctcaactgaaaaggaatcccagggaaggaggagatacggaaaaaatatgcctttttttaagctaaacacgtctcagatcaagagctgtgtccattctgcctcctgaaattccatgcgtttagtacttgcaaacctttacttctcttcttgtgtttttcctccctaatgagtttaactactttttaaaaattttattgatagtcaagggtctctgaaaaatatttcttatttatttatttattatttttatttatttatttatttttttagaaggagtctcgctctgacacccaggctggagtgcagtggcgcgatctcggctcaccgcaagctccgcctcccgggttcacgccattctctgcctcaacctcccgagtagctgggactacaagcgcctgccaccacgaccggctaatttttgtatttttagtagagataaggtttcactgtgctagccaggatggtctcgatctcctgacctcgtgatccgcccgtctcggcctcccaaagtgtagggattaccgtcgtgagccaccacgaccggcccctgagagaaggcattcttgtcttgtgccagttttcaaaaagaaatggtttcaacttgcatctatttggtatattggctgtgggtttttcatagataactcattattttgaagaatgtaccttcaatgcctagtctattgagggtgataacataaaggatgttaaactttattgaaagatttttctgcatctattgagataatcttgtgggttttgtctttatttctgtttatgcgatgaatcacttttattgatttgaagcaaccctgcatccagggataaagcttacttgatcatagtcgactgacttttattttatttatttattttttgagatggagtctcattttctcgcctaggctggagtgcagtggcgtgatatcagctcaccgcaacctccgcctcccgggttcaagcgattctcctgcctcagccttccaagtagctgggattacaggtgcctgtcaccatgcccgcctaatttttgtatttttagtagaaacgaggtttcaccattttggccaggctggtctcgaactcctgacctcaggtgatccacccacctcggcttcccaaagtgctgggattacaggcgtgagccaccacacccaacccatagtcgattaactttttgatgtgcttctggatttggtttgtcagtattttgttgggaattttttatcaatgtttattaagaatattggcctgaggttttctttgttttgttttgtctctgctaggttttggtatcagaatgatgctgttcttatataacgagttggggaggagttccttctcaattatttggaatagttttagtaggaataatagcagttctttgtacatctggtagaattcagctgtaagtctgtctggtcctgggctttttttggttggtaggctgtttattactaattaaattttggagctttttattgttctattaagggattcagtttttgttgttgttgttgttcaatcttgggaagatgtatttgtccaggaattcattcatttcttctagattttctagtttgtgtgcgtagaaatgttcactgtagactttaattattatttgtatttttgttgggtattgtctgttttatcatttctaattgtttcttcattaatctagctagtggcttatttattcttcattaatctagctagtggcttatttattcttcattaatctagctagtggtttatattattaattttttcaaaaaatttactcttcgatttctccatctttcttgtagttttttatgtttaaatcttcttcagttcagatgtgatttttgttatatcttgtcttctgctagcttaagggttgatttgttcttgcttctctcattcttctatttatgacatcgggttgttaaatggagatttttctaactttttgatgtgagcacttagtttatagcactgccttagttgtgttgcagtgattctgctgtgttgtatttttgttctcacgtatttcaaagaacttctcaatttcattttagtcattcaagtgtaggttgtttaattttttatgtgtctggtttcaagtgcttttatttgtattgaattatatttttatcaagctgcagtctgagtgtgttgctgatatgatttggggatttttgaatttgctgaggattgctttagttttaaatgtgtggtcagttttaaagtatgtgctctgtggtaatgagaacgatgtatattatgttgtctttagatggagagttctgtaggtgtctgttaggacaatttggtcaagtgttgagttcaggtcctaatatctttgtggtttttttttcctcagtaatccatttattagtgtctgtggggtgttgtagtttcctcctattattgtgtcagagtctgtcttcataagtcactaagaacttgctttatttatttgcacccataaatttatataacacatttttctcttctgcttttttccccataaacacagtgtgcccaaggctattccacagatgtctgaattcattgtctactgaaattccgacgtcttgacagttcaacatgttccaggacatggctgttgtaggaaaaaatatgaattagaaataagaggatttattcacataccttaaaataaaggagaatattttgctcttctctcttttcttatagcatttatattatatgtagacaattttctctgttttttttgaaatatatggaagtcatattaacagctaaataaaccttttggcattcttttttactcgggattgtctttatctaggaccttagattcattgcttgtttttgctttggcaaaagtttatattttttgttattagccttctaaggtagacacagatttgtttagataaatgtcattttaagtgcacacaaaagtttggcaccaagataggattaaatttagcaatacagaatgattaaagccaagagatactgagtaagttcctttgacagaaaactgattatctgaggtaatgatctaatatttgcaggttgaagtacttacactgcaaaagcaagtgtagttcagtgtataaactgtggagtctgtagttgtactttgctttctattttatacttcagaataattagcatagttatgtgtactgttagtaaacaacctgcatttatataaattaaacggtattttctacaatagtattcatacaatagtaggaatataagggcaaaatatttactttgaataattgttttaaataatcattttaatattgttaatcatactgttgaaatgaagttttttaactgaattatggctacagatacttttaaaatattttacatacattatgactattacattaatttatacttatttatatctaatatccaaaaaattgctaccaaattgttacagtaaatatttgtctaacatgcttattaattgatcccatatgggtagttacagataagcataattttagtgtctttcatttcactaaattggaatgctgctattacgggacaaataaacaccagtgaagtggtcactgagaaaccataataactgttaatttagctgggttgcaaggtcaaatgtatttcactatataaacaaagtcagatttcaatttttcacctacaagggcttatgaaaattgtcagatgtattccattgtagatctcccattcattggctaggagataagagagcagcagagataaaagagaaaccttataaaattctgctgagaatattttttcctttttcataatgctcatgtttctcatgctgagagtacctgtgcactttgggtttttttgttggtttgttttttgagacagagtctcgctctgtcacccaggctggagtgcagtggcgtgatcttggctcactgcaacctcctcctcccaggctcaactgattctcctgcctcagcctcctgagtggctgggatcacaggcacacgccaccaagtccagctgatttttgtacttttagtagagatggggtttcaccatgttggccagattggtcttgaactcccggccacaagtgatccgcctgcctcggcctcccaaagtgctgggattacaggcatgagccaccacacccagcagcactttggggttttagagagaaattcctttaaggagaatattttctggctgatttgatcaagtttatgtctaatcaaagtgttgttcttaagatgcctttaactttttttttctccatataatcttgctcagactgagagctgtttttctctccagtgctttgtatggctgtttcagggatcctgttagtatcccatggtgtctgtgaataaggtgagctgtcacagtgagaattcttagacctatttctatctggactcatgctggaaatccagcagtatttttttcatgtcaccattataaatagaaactgaggctgaaacactgctttcatttccattatcatgaaggtgcagttctacccaggaggcctgcaggctctcctcctgctactcaggcttcattgtctgatgggacgctggagtgctgctgtggcaactggggttcatgtaagatgtgagctgccagctgtatgccctgtgctgtatgtaggctgtacctcagtggcagatggtagggttcaagagaggacactagccatcaggagagggcaagcaggattgctataacccagtgctcagggagtagagagccattgctttaaaatgtaaatagccaaaaagatagcaccctaatcaaccgtttgtgtagcagagtgagccgactttcagcaggcatctggcttcaagttgcaaaactacctcatatcatgaagatgggaaaagtttattttatcactaaatataaccaattagcatacatgaatggcctctccagttaccaggtgagttcaggatgaactatgtatgacatggtgctatatattcttctacttgtggactaattatggtgaccactaattatggtgacagactaattctgtctttgcaatctgttaagcagattgactgtgatgcatgacacattctcgattaattgtgtaataaaacatcattcttactgttctgtcattgtggtgtttctctggggatgcagaaaatttttcttttaattatattttccaaacactgtcaagaattatcagacacaataaaaacatataaggtgccaaccagaatttactatagagaggactttccctctcaggcttccagtcaactaacaaatttgctgcaaagtgcctgctttctcttaaatatgcaggcagaattatgtctctgcctgttagatacctgtagttttctatagtcacttctagagagactagaccagatttctacagacttgacagggcaacaatcaaccattttacctctttctatgactcttgtatcttcagtcctgaaactgactcacagaccctggaccccaggtacccaatcagagtaacgtgtgcactgagtagacatgtggaaatgagagtctccacgttcccctttctcctcttgctaaaatgcccacaaatgtgcaggtaccacctgctgctactctatccatccagagcctaaatctgcagctccaaattctgaatctaggtcttgagatttggaaaataaaaaaaaacttttctctgaggaatgcaagtctttttagttgtcaaactcagagagagattaaaatgagagcacatttatgtccttctcccctttttgaataatgtacttatctcttgaaagcatttgctattgccaccagtagctataacctaaactaataatgccactctggacactataattcatactgtaaaccttaatgatgtacatcgaatcaataatcaatgttatttctgtaaataaataaaaatttctgataaatttgtaccagccccatctctgtccatctttttttggctttacaaatccacttgtaactgttgctaaacaaagtttagatttcaggcaacttgaatctttgctcccaggttataatcctcaagcttggcccaaataaactgtctacatatattcatgttacctcagcttatttcttttaggtaggcatattatttagaatgtactagagcagcctctatgaggggatttctcttttgactgtactccacttgctgtcacacccgagaatgcaaagccaggctgatctgacatagaatctgcatgtaagatctgacctctgcctgggattcacaaagcaaggtcaggctttggatttagaatgtacagaaaacaaacaggaaacattttctgcatggtgagatgtcaacatagatgtcttgaagttcccatttgagaatgtggctctttgagtttttcaggtcttgtctagtgacctgctgcagttatgtgaggggctccaggtgtaaatagaatctgatggcagaatctataagcgtaaacaagcatcttcagagtaagagattaaggccacaaagtatccagagcctccaccaaactacacctatgtgttaaatgtgatactggagtagagtattcttgtcctttgtttgtttgtttgtttttaacccaaaagctagctaatcaggatgggtgattaaagttctggagcttcaccagggcagttcaatttttcatttagcctgagtgtctcttcccggacttatcaatgggccatcagctcagaagcactgggaacctctcacaatcaccaggacatctactagaaatttgaaaatgtccaaaacagaattgtgtcgagctgacaaaagtgtataattctgcttttgttcagtttaagtaaaatagtttactctgtgttttcctcccctcatacatgagatatctttggttggtacccagatgagagtttctccagtttcctggtacttgagtgaaaaacaaggaagatgtctggagactcaaacagatcaactaatagtttccatttcatatgaccattagaaaaatagctgaagtagttatggcccctaccatccaggaaattttagtctaggccatcaactagagaaaatggctaatttgagcatcatatggtgggtacaatgaatagatgtgtgcaacaaaacttgggctttatttgggtcactttctttatattgttgcgacttctgatgttatcacctaaagggatatttatggagagaagacttattatttctgttctttttaccttgctaggaatacatatttatcttcaaataaaattatcctagaaaactttaagagatttgtttaaattgcctgttagtatgtgttataaaattaacagggcagtggctaaaaaagattaaagttacacaaactctgggatttaagtttctcttaggtaagtttacaaaaacagaactcaaaatacccactgtcatagagaacagaattctgcttaggaacctctccctgtcccagttctgtttagattcaccctctatgaaggccttactaaggtctggcccaaccctggagttttgcctcacagaactgataagaagagatgagagttttgaatccttttgcctctctagagctgatgctcaaaattttttaaaaatccaaaagcagatgaatgggataaataatgtattttaggttcttaatttattattattattattattattgagatggaatttcactcttgtcacccaggctggagtgcagtggcgtgatcttggctcactgcaacctccacctccagagttcaagcgattcttgtgcctcagcctccaaagtagctgggattacaggcacccgccaccatgcctgactaatttttcatatttttagtagaggtggggtttcatcatgttgcccaggctggtgtccaactcctgacctcaggtgatccacccacctcagcctcccaaactgcagggattacaggtgtgagccaatgtgcctggccttttttaatttttttaaacagtgctagcagagacagtccaagtactacttgttctctatttctgcagatccagtagttgttccacaagtcacaaaaaaagtaaatataaacacaatacaaattctgctaaactatacaaactctttctatatccctttcacctgtctatatttaagttttattctatacatttaaaaaaagtcaatgacagataatcagaagaagacataaaaatgctagcccccccctctctaaaatctgggaattattaaagacagtaccagggaattattaaagacagtaccagctcccagggtgttatgaggattaaatcacaaagtacgttatacccagcacagtgctctgtaacatactcttgagcacatagtacctgcttaataaacattgcattagtacatgtgcacatgttggtttccaaatgtaaatttattcaaacgttgctgacttctgtttgttctgtaaactttaaagaaccagcaaagaataaggaaattggttgtcttcatttgtcctagaagtatgtgtgttgtgacgagggtgttcagtgtaagggactctttgctgtgcctgctttctctaattactgctaatgatgagcccaggggaagcaacatcagcattaacagggaacttgtgtaaaatacccacttacagacactttccaagcctgcaggattatatcacacagagtggggccaaagttaccacgtgattttaaagcttattaaagcttgaggggcaatgcttagctaaatggttatcagcccatgtttctagttaggattacatggttaatttgccaaaatctctttacttatgccttttttattttacaggttctatttattattctgagtagaagcatccatgttgtttaaattaagtgcctcatgtgacccttaggtgaggccagaatcaagtatgagaggttcgagatacatttatgaaagttaagttccacctttgaactaaagggtggtcacagggcctgttctgtttggatttggtagtgacaggaaagtgtagctcatattttcattactgtagcagaaattgatggagtctgttaaaagggaggtcacctgaggacaggaaagaagaagcttttacttttatttccatggagcagctcatcattcctgagtctttattttaatataaaaaacagaaatgggtggactttttttgcagctctgggtccttctgcttgtgggcgtggtggtagtaggtgaacatgtggtgctgacacctttaaaggcatattctccagatccaggtgtaatttgtccggagaatctcatctgaagtgaatttccagagaaggagtagaaagaggaaaaaatgactttttttcagctaaacatgcctcagataaagagctgtgtccactctgcctcctggaatgccgtgctttcagtacttgcaaaccttaatctctctacttgtgttttttctccctaataagtttgttttaagtatgttttaaattttttatggtagtcaaagttctctgaaaaatatttctttcctatataccagagctttctctacattctctacatcatggcttcttatatgccatgcaaaattctcaccaggaatttatggtctgcaatattaaaaatgttccccttgtggtgttgaacatgggaagtcacggatactgaagattcctattgggaaaagctggggtccttagtaaagatgaagaacatctaatgttgagattccatctgagctcccccttagctctatgcagaacactgtttagaaaatgctgatttaaacaagatggtatttattacacaaaaacttctaaaaaatttattaggagatacttgctattagagtgttaaagacagactatttaaaatcactactaaaaatgacaaattttcgaggtaacttctaactcaacatatcttttacatctgaaacatatacataactgattctctatgatgcaagtagaacactgaaaagtgtacacatttgtgtttatactttatcatccagaaaagtattatagatacactggtgttgtggatcttatgccattctcttttctcaggattagagatattaggaaatatttctgtgtaaataaatattttattggataatttcagtcactcctgtaagtcagaaccagttctttttactctctcattttgcctttagtcaagttataaattttgctggctacctggtgtgtgtgtgtgtgtgtgtgtgtgtgtgtgtgtgtgtgtgtgtgtgtgtgtgtgtatgtgtctatgtgtgagtgtttgtgtttttcagggactgttgacatttacagatgtggccatagaattctctctgatggagtggcaattcttggacactgcacagtggaatttatataggaacgtgatgttagagaactacaggaatctggtcttcccaggtgatgacaacttcaacacacaattccaaatataccctaatggtttcatttctcttttttgtagaatgtgttttggtaatttatgctttgcataaatgagtttcagatctgtgttttcaagaaaatcttggggatttgtccatgtataaaataactttttcaggatgtttcatcttgacctgaaatttccacattcctgagctgatctgtgtcctttactctagattagcagtaatttcattaatttagtgacataaaatattgttgtccataacttaaaatctaattgccaacaccaagttttgactcagtattactggatagtgaaattaataacctacaaatttaaaatatttaataaaattccctgttagaaatcagtattttgtgattactttatgaaaatattttattacaccctcttttctgaacacagaagtaggttggtaactggagaatatgagcaaaatttacattattcatttgtaatgaaataggtattgctgtctctaagccagacctgatcatctgtctggagcaaaaaaaagagccctgaaatatgaagagacatgagatggtggatgaacacccaggtaggtgagagtgaaggtgaatacaatgtttaacacaaatgagaggtctaaaaattaaggagaaagccagttgttaaaatatgagttggaaagctgtgttttataggaaatagtttctgggaagcctaagggttttttgtttgtttgttttgttttgttttatctcaaatttggacatcttctgttttatgcttttaaattttctaaggattctgctttctttttagtgatcttctttcaagttttcagtgcgagccactaccctgttcatggcatataaaaaactgcacagtctgactacttttacattctttttgggaacacacaaatctgcataattttaagaaactctgtgttaaacaattttttaagttttctttttgtatcatgtgtaaaatgtgaattgtagtttctgttccttttttttggttcatttttctgcacatttcatcttgtttatattactatagtcttcaaatatagtttgaagttaaaaagtatgatgccctgtgctttgtttttatttttaagattgctttgactattcaaagtttattgcagtttcatggaaattctaaaattgtattttccattacttaaaaaattgccactgaaattttgatagagagtttatcgaatctatagatcactttggataacacggcactttaacagtatttattttttaaatgcatagacatgaaatatttttaaatttatttatgtcttttctaatttctattactgatgtatcattataaagactttttacctcctttgttaaatttgttctcagaaatttatcattttaatgctattgtaaataagattgttttcttcctgtattttatcagagagcttgtcttaagtgtatggaaccctaacttgtaagttaattttatattttcctaatttattgattgtatttagtagtttagacaggttttaatgtactgtttatgattttatatacataggatcatatgatctacaaccagcaactttttacttgttttccatttgaatggctcttttttatttttcgactaattcttctgccacatactttcaatgctatgttaaaataaaagcattgacaatgggcacaatatagttttgcgttggtgtatgtgaatttgaaggagcaaagacctcttcaagttttttaaactgctttcaggaggtaaagatcatcttttgttgggcccccagggtgatgggatgccctctgggtttgtagtaaagaggggttgcagcttggtcaccaggctgctggatctgcactagggtccacctttagctggcttgttacaaggggatttggtagttgtaattcccattttatattttggatagattgaatttcttttggtactttgctctgtagggcagacactagtgcaggtttctgcagtccagtctgcataaggtgggccttatgtcaaaatgtggatgagtacagctttcactgagtaccagaaagaatttttccaggtcattgtgtgggttcctaggtaggcagaactggccattaactgtggctcatggagctgaaactgagtcattgaactgcttcaagaaccatggtaaaggccaaggtctgcaggcctgcctgcgtggctataaatgaatgtcttcctccaggcctctggaagggcaggacctctctcagattgtggctggaaggagtttgagatggttacaccgtaagttcagaattttctgttgtgccaagctaggtaggccacttcctagtctgtagttaagaacttcctagtctgtagtttaccacctaaataagggcctgccttctgaaaagaagacttttcaatcttgggctttatcagatcttcacaactccctctctggatctcaaagctctcttaaaggcacttatatttgagatggggtcttgctacacaatccaggctggtcttgaaatcctggcctgaagcaattctctaacctgaatgtaccatgtagctgtcattacaggtttgagccatgagggcctggctctctcatgtaggtatttttgtgagagatggctgacaaattatcttgctgtgcagggagtaagaaaatagggtacccttccttcttccatcttactgatttcactctctttatacatttttattctttattttctattacaaatttgtaattttagattcagagatttagaacaatattctagaatttacatgttatgcctgaagtaaattagataattagtagacactccatatttactaaaacagttacttataaatttaagcttgctgtaggcaaaaaggaattataggatttgcacccactttttcagcctatatctaaataatcacataattttctcccatatatttgttttaggctctaaccatattctgcttacatttagcaatgtaaggctattctttgcttctaaagttgggtcacagcagttttattttgtgtaagaatagcatatatttaaaacataaaaattatttctagttttaaaaaaatgtttaaagtttctcatgagaatcttttatttatgactatactgcaatttctctgaaattttacagccatatagtgtatgtcaatgatttaaaatacctgccttccatgagtacacagttagtcaaatactgtagttatctagacaaatcctttcttcatagtacatcaatattgcaaaccagaatttatgaataaacatttctcttattattgttttccagtctatattggtgttttataatgttggtttcttaacatcagtttattgtgggttttgattttacttaggtactataatattagacaatttgcaattctatttgtacactttaagtcaatgtggggtttaattataaatcagccatatgtctatcacaatcagattatatacatgtgtgtgtatctataaatataaccctaatttttgttatggcttatcttgtatacattctctcttagctgaatggttgttttttcttgtccaagtgaaaagtcaaggaaatagtcttattttcaccatgtgtttaatgatgaatatatatgtcctttgtgtgagagaggcacttttgtgatttgaaggtaatttttgaaaaaaattataattctgtattttttcagtttttctttgaaaaacattgttgtaaaaacataaaatttaccatcttaaatctattaaagtgtacatttcagggctaggcatggtggtggctcacatttgtcatcccaggattttgggaggtgaagacagaagaatcgcttgagcccaaaagtttgagagcagcctgggaaacatatggagattctctctctacaaaaaaattataaaaatagccaggcatggtggtatgcacctgtagtctcagctctttaggagattgatggtggaggattacttgagcctgggagcttgaggctacagtgcgcctcaagcttgggtgacagtgagaccctgtctcgaaaaaagaagctgtacatttcagtattgtttagtatattcatattatataaaagagttccgtaaatttttcattttgagaaactaaaactcaatactcattaagtaacaactgcccattttaccctctccccagcccttgagactcatagaaacaaaacacccttccatgttttgtttctatgagtgtgactaattaagatatctcatataagtgaaatcatatagtatccatcattttgttactggcttatttcaggtaacatagtattatcatagtttatcttaaaatatgacaggatttacttaaggctgagtaatattctactgtgtgtgtatgtgtgtgtgtgttcgtgtgtgtgtgtgtataacatggtttttgatgtgtttataagtcaaggaatatctaagttgcttcagccttttagcttttgtgagcactggcacaaaaaacacagatgttcaaacttgtctttcaggtcctgtgttgcatattttggatataaattcataaatgagattgctgtatttgatgatacttttattttaataacttgaggaacatttatacattttgaaataatgactacatccttgttttccacccacaatcaacatgactgtcatttttattgaatcatcaacagatttggtatttctaaaaaattgatatctgtcattctattaagtataaggtgatcttgtttttcaatgtaatttttattcatttctttacaaatggtaattctgcatgttttttcaaagcgttttcccatttgtgtatttttttgataaaaatttagttcaattatttctaaatcaagttattcaacttcattgttcagttttaagagttgcttatatacttttaatattaattcctatcatatgtgatttgcaaatactttcacccactttctgaaaggcattgttactctattgaatgttttcattgacatgcagaaattttggagtatagtgtagttaaatttttctttttttctttgttgctcatccatttaatgtcgtatctaagagaatggtgccaagaccaatgtcatgtcttctccctatatttttttctaagagatttgttagttttttaatgtctaagtattttatttaaaatacttttcatatttggttcaaggaaatgatctaactttattttatcggtgttgatatctagttttcaacattatgttttgaagagattagcttctctctattgtgtgctcatggcaactttgtggaaaatcatttgattatacgtggaagggtttatttctgggctctctattgtctttcacctgtttatctatgtgttagtaccatattgtttgtcttatttagcttttaatacgttttgaaatcaggaaatataatgcttccttgttttttaatgggtgtttggctatagtttatcattaaattaaaaaattttaaacaatatgtttgtaaaaaattgtgctattcagatttttatagagattataataaatctgttcaccactctaggttgtatcgacatctttgaaggattaaatatttttaccctcaagccaagaatatgctaaagagtgtgttttattttcatatatatttggatttgccagttttacttttgctcttaatttcttgtgttattcagttctggtcagagaacacatatgattttggtcttcttaaatttatgtcttgttgtttgaggcaggatcttactctgtcactcaggccgtagtgcagtggaataattttggctcactgcagccataacctcccaggctcaagtgatcatttcagctcaatctcccaagtagctgacactatagcaatgcattaccctgcctcactaattttgtgattatttgtaaggacagggtttcactgtgttgcccaggctggtctcaaatttctggctccacatgtttctcccatctcagttttccaaaatgttgagattataggcatcagccactgcacccagctggtattctcaaatttaataagacttggtatgtgtcctaacagaatataccaggcacaaataagaatattgtgtattctcttgcttttgattaaaaaggtttgtatatgcctgttaagcctgattggtctgcaatattgtttggatttccatgttctccaaatcttatgctgcaatgtaatcctcagtgtttaatgtggaacaggtgggaggtgtttgtgtcatgggggcaaattcctcatgaatggcttggcactagcttgttaatcaaagtgtttacactctgttaattcaaagattggttcattaaaagaacctggcttcattatctcacacttgctctttgtcttaccatctaatacgtcctgttactctttgcctttcacctaattgtaagcttctgagattctcaccagaagcagatgctgacacacactttttctacagtctgccaaactgtgagccaaaaaaacctctttgcttgatgaattatccactctcaggtattcctctctgcaaaacaattgaatttggcaatttgcttctagaggcattatgttatattggggagcagaaaaaccgtgttgggtaaatataacagacttttctttttcttctgtgaggttctttatattgtgctcacctgggacactgtccacacttaactcatttataaattttccacaaaagtattttggtcagtatgattttgttaactttatatgtctaggaagaaattatggtctgtggtattgtgctatgtcatcttgcttatgtagtttgtgtaattttatagattagacttagaaagtatattagagtctagcaattaaagtaatgtgttatttttatttctttcagtaatgtgttctcatttcacccaagactttttgccagagaagaacatagaagagtctttgcacaaagtaacactgagaagatatgaaaaatgtggacattaagaaatttctgttaaaagaaggctataaaagtgtggatgagtgtaaggtgcacaaagaaggttataatgaacttaaccaatgtttcccaactacccagagcaaaatatttcaatgtgataaatatgtgaaagtctttcataaattttcacatttaaaagcatataagataagacatgctgataagaaacctttcaaatgtaaagaatgtggcaaatcattttgcatgctgttacacctaattcaacataaaagaattcatgctacagtgaagttttacaaatgtaaagaatgtggaaaagtctataacagatcctcaacctttactacacataagagaattcatactggagagaaaccttacaaatgtgaagaatgtggcaaagcttttaaccagtctacaaaccttactagacataagagaattcatactgcagagaaaccctacaaatgtgaagaatgtggcaaagcttttaaccatccctaaaaccttactgaacataagaaaattcatacttgagagaaaccgtacaaatgtgaagaatgtggcaaagcttttaaccagtcctcaatactttctaaacataagaaaactcatactggagagaaaccctacaaatataaagaatgtggcaaagcttttaatcggtcctcaaatcttactacacataagataattcatactggtgagaaaccctacaaatgtgaagaatgtggcaaagcttttcaccaatcctcaaaacttgctaaacataagaaaattcatactggagagaaaccctacaaatgtgaagactgttgcagagcttttacagactctgcaacccttactagacataagagaattcatactggagaaaaaccatacaaatatgaagactgtggcaaagcttttacatattctacaacccttactagacataagataattcatactggagaaaaaccatataaatataaagactgtggcaaagctttcaacgaatcctcaatgcttactacacacaagaaaattcacactggagagaaaccatacaaatgtgaacaatgtggcaaagcttttacagactctgcaacccttactagacgtaagagaattcatactggagaaaaaccatacaaatatgaagactgtggcaaagcttttacagactctgcaatccttagtagacgtaagagaattcatactggagaaaaaccatacagatgtgaagagtgtggcaaagctttcacagactctgcaacccttcctaaacataagagaattcatactggagaaaaaaaccatacaaatgtgaagactgtggcaaagcttttaacgaatcctcaacacttactgcacataagagaattcatactggagagacaccttacaaatgtgaagaatgtggcaaagcttttaaccattcctcacaccttactacacataagagaattcatactggagagaaaccatacaaatgtgaagaatatggcaaagcttttagccaatcttcatcacttactaaacataagataatttatactggggagcaaccttacaaatgtgaagaatgtgacaaagcttttaacctatctgcaagccttattaagaataagaaaattcataccagggagaaactctacaaaaccagaaagtgacaatgattttgacaacacctcaaaccttttctaaatataaaagaaattgtactggtgacaaatcctagaaatgtgaagaatgtgacaaaacctttaaaagattgtcccacttatttttaagtaagataatttttactggagaaaacacctacaagagtgaacaatattgtgaaatttctaattaatagtcgcaagttattgcacaggaaagcatttatacttgagaaaaattgtataaatacaaataatgtgaaataaccattaatatctgctcacatcttactcaacgttagagagttggtaaataataaaagcattataaatgcaattactgtaaaaaaatgtcagcctttaaagtgaagaaaaggctgggcacagtggctcatgcctgtaatcccagcactttgggagtgctcaggtgggtagatcatggggtcagtagtttgagaccaacatggccatagaaaccccatctctactaaaaatacaaaaatttagccaggcatgttggtacacacctgtaatcctagctactaaagaggctgaggcaggagaattccttgaacctgggaggtggagattgcagtgagccgagatcataccactgcactccagcttgggtgacagagcaagactccatctcataaaaaaaagtgaggaagagtattcattctgaagacaaagattacgaacataaagagggttgtagtacccttacttgtatcacagattttattgcacacattttgtactacaaaaaaaccctgaagcaatttctcaaacttggctcaacatcaggaaatttatgttgggaaaaaaatcttgcaaatggcaataaatttggagaaaaattgtttcaataactatttcttagaaaacaccagaggtttcatactaaaatatatttttgcagatgcagtacataggaaacaatgtttaatccaaaatgaaatcaatgtaaatatcagaaaattcacagtagaaatacctaaggcactgaagctgtagacattacactaaatcagagtgctaagtatagaaaataatctagaactaagttggtaaataaattatttgtacatcactttaaaagaaatagaattttttaaatgttataattacaagtatactttggtccttaaaattagatattttaaacaagaataatgatgcaattctactctcaaattacttcatgctctattttccttcctactgtattcacctgtgaaagcatgttactaattgctgcatcaaaaatataagaggtttttttttattaggtgggcattatttatgaccttttctatggaagagaaaaggcattataatgtaagacgtgatgaaattgtaagtggagagactctttttagttaacacgtagtattaagtaatgcatgagttagatgttcagagtaatattctacattatggtgataacatttttaattttagttaattaaaatttattagtagtatatcattttactaatagtacttttatgtaatagaatatagtacattattaaatttttagattaagtgtgaacttattttttttttgagacagagtttccctcttgttgcccaggctggagtacagtggcacgatcttagctcactgtaacctatgcctcccgggttcaagtaattctcctgcctcagcctcctgagtagctgggattacaggtgcccgccaccatgctcggctaatttttttgtatttttagtagaggcagggtttccccatgttggtcaggccggtctcgaactcctcacctcaggtgatctacctgcctcagcctcccaaagtgctgggattacaggcataagccaccgcgtccggccatgtgaacttaaatttttaaagtttgttaaaaccattgtgcattcaataaagtgttattatgccactaactttaatctattcaaccttactcaaggatgtaggtaaaagatggtaacaatatactatttggtaacataatggactaacatttctagtaatctcttttgccagtgactttaaagtgcgaagaagttaaagaatattgtttccataggttaaatatttactcgttttttcttattttagcttatttgtcttaatttttgtgagtacatagtatgtgtaggtatttatgctatatatagcctatttggatacaggaataaaataggtaataatcacatcagggtaaattaagtatccatcatctccagtatttatcctttgtattagaaacgaattctacatttttcgatattttaaaatgtacaattaaattgttattcactacaaggtcatgtttatgatcataataaaagttatatacaattataaataaaatccatacatttctgagtccaaaataaacattaaaaattgttacatatctttctttgaatatatgacatctctgcctgcaaacacatacagacttttagttttgatttacatagagttaaatatacacatacattactctaaagataaaacctaattttcttaggtttaagaaaattatggagtaagtaagcatgtttgaatgagtttgtacctattttcagaagaaaaaagcaatattggaagaaaatgaatcattttaataaggtgactagaagactaaaaacctcaaaaatgctaaaagcaaattgataccctctgctttttattgaattgattactgtaaaatcttacagctaatggatcagaatctccttatgcaaattttttgtctttatttgtctggtactcatgctagacccataattttcttgtttctcataatttttcccttttatagcttatgagattttcattatgtgagctggtcgaggattgtatgaatgatttttatacaacttagtagtgcacagaaaataatttctagatgtaattccacaattcgtttattaagttatattttattgagttagaacattccatttagttcttttaactggagaaccctatagaagcctactttttttaagttattgttcctttcactttttataattgacagaagtaaaattgacctattgatccagccagtttgttcaggtaagtactagggaagtttcataagtcatgaggatgtttatatatataaatatagcaaacaaacatggcagtgtaactgatgctccatagaaaggcagaaatattcccgtgaaagttagtttcaacttcatgtaagagatagaaaatattaatggtgaacaaataactaattcttcatgtgaagagtcatttttttttcaggctgcaaagctggatcttgctgaatttaaagaggaattttgcttcttttatattcgaattatctttagttttctttgtctaattctgtgtttttcaactgtgtgtgcatcacagcccttctttgtctttttctgttttatggctacaattttctcataatcattttcatgccatgtcatttaggatggtaatttgttggttttgataagaaagttggtatttttaatgcactttaaaaaatggttttaactggagagtttgcttatgcatatagctttcaaatgagttaattaagataaaaggcacacactgttcacaggtaagagaattaaatcagttagcatcatttttctctgtacacagaaaatctcattaaattcttacaaagtttggcaagtataaaatgtgctaaaatatatatcttagaatttaaatttttaagagctaataagtgaattgtaaatttaattttctatgatatagaacaatgtacatttccatgcagaatcttctatttttaagtgtaatgttaaacatttcaaagtaataaagtgacctctgtagatttaaaatttggaataatattttttgcatattgatattacaatttggggaatttctcactcttatatcagtttttttggtgggtgaagtttacagtttttattcttaatcacctaatggtagacaactttttggtcattttctctggaaaacatttggagatcatgtcagattttggattaaagctttttttaattatttcgtatgcaaacttgtttactgtgttctgagtggccagtcatgagaccataagcaacacctgccctcttagtgtcttttgtaccatctgtaatgaataaatgtaaatttattctgtaaaacatgacattttgaagtatgtatatacattgtcaaatgcttaattctgggtaattaatgctttacctcatatagttagttaacacttttgtggtgagagcacataatattgtctcagaattttttaaaaaatgcaaatacattattattaactatagtcactgtgcagtagaaaaaaatttttgaacttatttctcctctccaactatagttatgtattctttgacagacatctttccaaacccccctttcttctaaatactttgatatctattgatcataattttactccctacttcagtgagattaagttgtttagaagccatgtataagtaaaatgaaataattatctttctggctcttatttcaattaatatgtactctaggtcaatccatgtaattgaaaataataaaattcgcttttttttttttttgagatggagtctcactctgttgcccaggctggagtgcagtggcatgatctaggctcactgcaagctccacctcctgggttcatgccattctcctgcctcagcctcccaagtagctaggactacaggcgcccgccaccaagcccagctaatttttattgtatttttagtagagacggggtttcaccatgttggccaggatggtctagatctcctgacctcatgatccgcccacctcagcctcccaaagtgctgggattacaggcgtaagccaccgtgcccggcctaaaatttgcttttaaaaagatgaatagtattctcttgtgtatatacaccacatttttgttttgttttgttttgttttgttttgagatggagtctcactctgtcaaccaggctggagtgcaatggtgcaattttggctcactgcaacctcagcctcccaggttcaagcgattctcctgcctcagcctcctgagaagctgggattacaggcgtatgcccccacgcctgtctaatttttgtgtttttattagaaatggggtttcaccaagttggtcaggctggtctcaaactcctgacctcatcatctgctcgcctcagcctcccaaagtgctgggattacaggtgagaaccactgcacccagcctaccacattgtcttgatgtactcattagatactgaacaattgattctatattttggccactgcgaagagtgttgcaaactacacagaagtacaaatgtttctttattctaattttatttgtttgagatatatatccaatattgcaattgctgtattgtagtttgattttaaactttttcaggtatctgtattttgttttccataacggttgtcatttacattcaacccagaatgtggaagaatttccttttcttcccacctttgctaagacttttttttttaaataagagtaattttaacaggtgtgagttatttcctagggtttttttttttcgctttcctttccctgataataattgatattgagtaattttgtttttgagacggagtctcactctgtcacccaggctggagtacaatggcacagtcttggctcactgcaacctctgcctcccaggttcaagtggttctcctgtctcagcctttggagtagctgggattacaggcgcctgccaccaagcctggctaatttttatatttttagtagagaaggggtttcaccatgttggccaggctggtctcgaactgctgaccttgtgatccacccacctttgcctcccaaagcgctgggagtacaggcatgagccactgtgtgcggctgatattgagcatttttttatacatctcttggccacatgtatgtcttttcttgaaaatatttacttaagacttttgctcatgtttatttgtttttgttgtatagtcatttgagtttcttatatatttttgacattaactccttgttacctgcgtgatttgcaaatattatctcccatttttcagttgtttaattttggtgattgtatcagattgtgggcagcattttaaaaatttcaagtaatctaactcatcaatttttgtttgttttctggaatttgaagattaaataaaaacagtcactgcctgttatggggctttcactctatttttttgtagtaattttagagtttcaagccttacttttaagtatctaatttatttagggttgatttttatatgtggtatgagatgcagatcttgttttattgctctaaatgtagctataaagttttctaaacaccatttatttaggatactgtccctaagaaattgtcacctatttatataatcacctatttatatataactgatataatcagttagctgtaaatacatggatatgtttctgctctctcccttttgctccattaatctatgtgtccacttttattcaagtaccatacgtttttgttattatagctatgtagtatatttcaaagtcagctagggtgataccttcagcctattttttctttactgttttgactattgaaggtcttttttggtactgtatacattttaaatacgttttaaaagttatatttagtatgttgctggtattttgatagaggttgcattatatctgtagatcattttgtgtaatgcaggtatttaacattattaaaaataccaattcatgaataatattttttcattttgtattagtttattttaacgttcctcaatttataatgtaaggtgtttcaaatttttgtttaaatttaattcaaagtatagttactatactttataactaattccaagtatagttattatagatgagattgttttttattttattttgagatagttaattgttagtatattgaaattctactgacttttgtatgttgattttgtatactgccagttcaataaattggtttactggttctactggttctcagtaaagtgttaggcttttctctacttaaaattatgtcatctgcaaacagctataatttttttccaatctggatgcctttgattttattttccaatttttctgtcttggacatttagtaccatgcttagtaagactgaaaagcttataacatttccatgtttagtatgttaactgtgcaatttttgttataagcagcatttattaacttgaggtgcatttgtcctatacctaattttttcagagatttattatgaggaaatgtgacttttgtcaaatttttattctgcatgtatctaaatgttatggatgtgaaatcacaatttatcccacttaaatacaaaacatcttcggagactactatgaacatctctatgcatgcaaactagaaaatttagagaaaataaatatactcttgatatacaaaacttcccaaaattgaatcaggaaggaacaaaaatcttgggcatagcaaaaatgtgtaataatattgaattagtgatataaaacccaccaaccataaacagctctggatcagacgaatttacagccaaattttactacatataataaagatgagctggtactaatcctactaaatgtattccaacaatcaaggtggaaattatttctaacttattatatgaaaccagcatcattctaataccaaaatctagtaaagatacaacaaaaaagacaactataggccaatattgttggtgaacataaaacaaaaattctccattaaatactagcaagctgagttcataagcacatcaaaaagttatttttccacaatcatgtgagctttacttcatgactgcaagaatgtttcatcatgtgcaagtcaataagtgtgattcaccagtaaagatgattaaaagcaaaaacttattatcacagtaaatgcagaaaaagcattcaagaaaattcaatattcattcataaaaatattcttaacaaaccagaaattgaagaaacgtacctcaaaataaaagccatttatgacaaaactttatttgacatcatattgaacaggcaaaagctgggtgcattctcaataagaagaaaaataagacaaaaatatccactctgaacgcttttatttaacatagttctggaagtcctagccagagcaatccaacaaaatagtgaaataaaaggtatccagataggaaaataagtcaaattgtcttcacagaagatataattctctacctgggaaacttcaaagatttcccccaaagattcttaagcctaaaaaatgacttcagcaaattcttaagatagaaaatcgacatacccaaacgagtaacatttctgtataccaataacattaaaatcaagaacacagttctgtttacaatagccacaatcaaaaaataatatctaggactacattaaatcaaggaggtaaaatatctctacaaggagaattacaatacactactgaaagatatcagaaaacacaaataaatggaaaagcattccatgctcatggattttgaaaactcaatataatttaaatgtcctaaagcaacgtacagattaaatgctatctctatcaaactgtcaatgccattttttataaattcaataaaactattataaaatttatatttataataaaaaagcctaaatagctaaagcaacattaaaaggaataaacctggaggtgtcacattacctgacttcaaactttactacaagttacaataaccaatataacctagttctggtacaaaaatatacatatagaccaatgaaatagataagagatatctgaaataaagctacactcctgcaaccaactaatttttgacaaagtcaacagaaataaaaaggaaataaatccctatttaataaatagtactgggaaaacttgttagtcatatgcagaagaaaattagacccttacctctcattatataaaaaatataacttaagatagattaaaaacttaactgtgagacttcaagctatataaatgttaaaaaaacacttagtactctagacactagaaagaatttgtagctaacactataaaaatgaatgcaacaaaaataaaaatagaaaattggcacctacttaaactaaagagctgcacagcaaaagaagctattgacaaagagacatcctacagtataaaataaaatatttgcaaattgcaaacaacaaagaattaacaaatactatctatcagaatttattaaaaaacagacaaataatatgaatagacatttttaaaaggaagacataaaatctgccaataaacatgcaaacaatgctcaacattcctagtcatcagagaaatgtaaatcaaaatgacaatgtgataccatctcacaccagttagaatgacttattaaaagttaaaaactgacaaagacaaaagttgtggaaaaaagggaatctttatatactatcggtggaaatgcaaattaattcagcccctgtggaacacagttcggagatttctcaaagaactacaaatagaattgccatttgacccatcaatacaattactgagtatatatccaaaataaattatttgacacaaaagtcctgcactcacatgtttactgcagcactattcacgatagcaaagacacagaattaaaccaggtacctttgaatcttagatccatgttgctgcaaggaacatttttttttttgtggctgcatagtattgcatggtgtataagtacctcaaataccacctgttctcacttataagtgggtgctaaacattggacaaatacagaaacaaagatggaaataataaacactggaagttgtttttttaaaggaaagcattgaaaaactacttatcaggtgtgatgtacactacttcggcaatttttactaagtgcccaaaccttaacatcttgcagtatacgtatgttacaaatcttttcatgtaccccttgaatataaaataaaaataataaaatgtcctgtggtataatgacatgttacatttctccagttctggggtggtaatttatattagaggtgaaagaaacaaaattatgctccctttgggcattggggtgaatgtttctccaggtctgcccacatcctgaaagctaacatatctgaaaggtcttgccctttaacccaagaagtgttttattcccaagtgtgcagctaaaataaatgactatatctttatgttttattttagggctatagggttaacttgttactccactctttttgggaaaatcatggtaagttgtttaatcacatgtcttattttagaataaaccatttttgtaaatgtgaggctgtgaaaattatgttacattcctgaattaaaataaaaacatttttctagtgaaaaaatgcataaaaatcttatggccatagcccaagaaccataaaacagagagtgttggttatttaagaccacactcctgaaaccatttcatcacaaccatactggtgagtaaaggaataatggatcagaaggttctttcagaatacttttcttattctattgcagtgctaaatttttacttgtctttattatttgccatatagaagtctgtacttctaaaaaagatgccatgaatttcaggttaatatgctcacacatatatgctcaccagagcctctagaaggattctggtgtgtttgcaatcgaggtgtgtccattctggcctttcttgtgttgctttgtttgtgtaaaatatgaaggcaagaagtaaagcagagtcaaccaggacatttctagtttctacagcaacagcagctacattttcatgttaggtcaactagaaataatgatagtattccaaaacaaaaaaaaactgatactttatattttttttcttacaatttatagcataaaatttttatagtgtctgaattatagaagttaaacaacttgaacataaaagtgtcatctagataatagtattatttcaatagcttattgtgagtcacaattgccccattgggtttaccggaaaacacttatttatttatttatttatttatttatttatttatttatttattttttgagactgagtttcgttcttgttgcccaggctggagtgcaatggtgcgatctcggctcaccgcaaactctgcctcctgagttcaagcgattctcctgcctcagcctctggagtagctggaattacaggcatgtgccaccacacctggctaattttgtatttttagtagagacggggtttctccatgttggtcaaactggtctggaactcccgacctcaggtgatctgcctgccttggcttcccaaagtgctgggattacaggtgtgagccatcatgcccggcctggagagcacttatttatcttctaagtgtaaataaagaataggttttccataatcctaagcatacagatcttttaagactagcggctgagcacggttgctcatgctgttgcaggaaattaaggaaccagagatactgatagggatgcaggagagcttttattttaggtgtacaccagctcagcagacaagtgtcctcaaagtctgatccctgaacaaagaaagcgagcaacttttaagcgttttgtggtgggaaaaacgtaaagcaggaagcaggtttacggaagtgagaacaaaagcggttaatcattcatgccatgtcttacaacttaggagaaacatgagttgcaactttcacttatctatcttgtgaccttgcagctgcacagcaagaataacagggacttacagaacttacaaaatatgtgggaaagaggtatggttaatgtttcacagacccttagaggcctttagaggagcagttaatattctttttataccttttcttcagggggttacttcacgcctattctaacctaacctaaaagtgtaaatttaatttctttttaattttctacttcatcccccccttttggtgctctatatataataatgtttaatagacagcaccacaattatctagttcttcttgggttggtatatattcttcttggggcgaagcctgatacttagctaatgccattatttgggtagtggtgtgtggccatgattgcctctatagttgactgaacacttctgataagaaaaggcaggagacaagggagaattaggcaggcacctgtgataaggaggaacccacctattaagatcttgaacccatgaaaggtaaaaaaccgtcctctaaacagagaatttggagatcatcttgaccaggtttgaactggaacatgggctaacatctgcatcctggccgtaatttccatgacagctcacctattatcatctatttctagacagcagtttgttgagttaaactttccacatactccttcttctgaggctaggaagtaatctagtgcccgcctgttttgatatatggcattcttcatttgtgtagcttgtacagccagtaaatgtaaagctcttgatgtttcattgattattattttgagcacagtttggagccttatgatacagttgagcatgtaaactggggtgcggtacccccatgactcatcttgtgcccaggtagcaggcccatggtatttgatgattttttcaggaggtcactcattatcttcctagttccctatgtctacatccttttgatgtttgtgtctattcttgtgattatgcttcctttagttcttccattttcatcataaactgattatcttaagagttccccttgctttagaggaattagaaagaaggtggcttgattgttcctaatacacatgtccctgaccgtttagccagcagttgctgatatgcctgcactccacaaatccaatataggccagagggtgctttccaagcatttggagcctctagtggatgccaagaatggcttagaatagagaatcaagagaaaaagtttggatctggtaagcaggagtcattctgggcatttctccatagagtcttatttttagtctcaagataatactgttgccctaggcaggtagccttatggaaggctgcacctttgaaccttgcttgaccaatattaaagtacaaggataaggttcctttgtaggtagatgagacccaggttttatttagaagggctccttctattgacccatcgtgggtctcaaatctccaggcacaagttcaggctcatagcatatataaagctggccatctcctgagtcacaggatgagtaggttgtttggttgtaagtacagaatcctaagagagtcctggtgcattcatagtatgtatggtataataaagttttaactactgtgtttctctccatgtggaatgtatgcaatgtggatatctttctttcaattgtatttctttttgcttagcctcaagtaccactattagtaaaacaagcaagcaaacaaacaaacaatatttttatactagacatgggcaggtaaggtttttccctagacagaaagactggcaataatgatagcatagtaacacggcaatcaacaacactaagacagcaataaaacttaaaatttctatccacatttacttatctgatgacaactccttaagctttggctgagtgtagactactcagcttccagtgtgactagagcggggcttgctattttctcaagcttccgccatgtgtagactggtcagcttccgaagtgaccagagcagggctgttgtcatctccactgacaatgcgatctcgtcgcaggatcagccaggttggatggtctgggtcctgttggctggtccactggtcctgggctgctggttttagccaactgtggtggatttaaggcatgataacctgcaactttaacagcagtgggagtggacaaaattacagtatggggcccttcctatataggtcccagagtagttggattccacttcttaacctaaacaaagtcctcaggtttgaaaaagtgtgctgggtctgccacatttataggcattttttttttcttgcacctaacaatgaatcttttgcatagccagccctaagtcttgcatctgcctttttaaagttaattcccttagttcctgtaggtcacctttaacctgatttataactgggggtggccgaccaaacaaaatctcatagggctaatacccagtttgttttgtggggctgcacctgactcagaggaggaccatgggcaagacctgatgctatcttagatgagtttcttgacaaaatttcttcaacagctgcttgagtgtccagttaatgcgctccacttttcctgagctctgcagctggtgggctatgagtaacttccactttatttttgatagtcaagttaagtcctgaactatttcagccacaaatgctggtccattgtctgatcctagagttagaggcagttcaaatctggggatagtgtctcttaacaacactttgatcacctcttgtgctttctccatctgggcggggaaggccttgacccatcctgaaaaggtgcaaacgaataccaacatgtatcaataaccccccgcttgcagcaatttggggaagtccataagcaggttttcacagggtgtggctcttgtttcttcagttctcggtggccgggtaggcccttgatgagggttgttctgagcacaagtcaaacactgctcacaaacagtttgagtgatggcagtgagctatggcacacagaaatgacgctctaataatgtctctagtgccgtctttcttatgtgagttccttagtggaactatttcaaaaatctgggggctaccatctcaggtatggctagttttctattggagaacttccaccatcctccttcaatataattcccatattcctgggcaaaccaatcccttttattaggagcgttgcttggggtctctgggaaggggatctccgggaggagaagcatagctaaagcttcctcttcagaaggtggatatgtcattgcagcccactttgcctttttgtctgcctttctggtttttgtttgtttgtttttggtgtctaatgttcctgccttctggtgccccttgcagtgcattactgctacttgttttggggctcatacagcatctaagagctgtagaatttttccttatattttatgtctttactttcagcaggtaagagtcctctttctttgtaaatagccccatgaacatgcaaagtagcaaaagcatatttggaatctgtgtaaatatttgccttctggtcttttgctagccagagagctcttgttagagctattagctttgccttttgagcagaagttcccatagacaaagactgcacctctactactgagtcaaaagtcaccactgcataccttgctcggtggaccccctgtagtatgaagctgcttccatcagtgaaatatttaacgtccaggtccctgaggggcctatctgtcaaatttctctggcctgagaacacttcatttgtcacatccacttagcaatgaaggggggcctcctggcactgactcgatgtgaagcaaggtaaccaggtttagggtattcacagtttctaaagttatgcagggacttttacattagatccctttgtattgggttattttcggatttgataactaatggtgcccccttaagtccattaaaattataactcccataacccagtgtggtacccagtttgttagttgttgtcttaaagtcagtttattagcttcctatgccagcaggaaagtagttaattattatttgcagatgatatcttcatttacttacataacaaaagcaactaaaagactgttttaaaagtctattgagacgggtaggcaaaattctaagataatccccaggattcccagtctgttgcacacccactgtgtaattctttttgagtgtaaaaatatgtgtgaatgtggtacgaaatgtctcataaaatttgattactcgtgttgactttgtgtttttcaaaagagacattatcctgattgggctgaacttaatcagaggtgttttttagagaaagagacacatcatagaaaaacactcctgctgacctggaagtgaattctaattgggctatgttgtaagctacttatagtggccacatgacagaaaatatatttgtatattgtcatcattcctgcctcttgcatattgcttctggtaaagagggcaggaggatcccatggcagaggaataaaagaggttcttattcacgcaagaaataattacttctcatctgagatagcttaagataaacagagaagatgacaacatgactatatcaatggcaggagaaagaaaatctggctgaaagggctcactggcattatggagcaatatttagtaagccacagtgagtgatcagcctctgagatatcaacagtccacaaagaaggctgaactcattcttattctgattaaatcagcatgtgtgccctattctggtcgcccagttttaccaccattacagaaattaccatggagaccagtgggcaccctcctagaattaacattatcatgaaaaagcatacctaaatatttgtttttacagttgaaaaatattgaaagcctaataaacttattaataatgaatttatcttctgataattttagaggaattctcctatactgtaatacaatacttagctttaaacacctatatacatatgtatatatatttctttttttttggaagtagagtctcactctgttgcccaggctggagtgcagttgcatgatttcggctcactgcaacctccactttctaggttcaagtgattcttctgcttcagcctccagagtggctgggactacaggtacacaccaccacacctggctaacttgtgtatttttagtagagatgcagttttactatgttggccagcctagtttcaaacttctgacctcaagtgagccacccaccttggcctcccaaagtactgggattacaggtgtgagccactgcacctggctataatataaatgtttcttaactgcatgagcaaatatgtagatagtttcccttagattaacatgataaagttacaattagagaaagcatctgaaattagataaaattaaaaccacattttttcagtggcttggaataactgccctactttatgaaatggccagattactaactagaagcaaagacaagattttggctttgctcaattattaagtccttgaccttttaaaatctaaaatcatgactaatggatttgaatggactattttttaggtgtcttcctaggatttccaaggcaatacaaaaagaattttaataggcaaaaaaaatgcactcaacacacacacattgtttttttctgatttcctgtattattgaaaagttgaagattgcaaatctagtctattaatttagagttaataacaaaagatttttcagtcaagcaaataattgtgtaaaactaatgggtaatggatgctcttagctgccaaataatagtatgactagattcagtaagtatccagccatgcaaatgacagcccaattaaattaagaccctaataggtgcatgtggaaagcactgatgtgcaatatggtgcaccttcactcagcacctttatctgcttgtttacagaaatgccagtttcccctgaatgactctgggtaaatgctaaaccatattgaaaacatggttaacacatttcttctatattataaagaaatttcatgaattttactctgcctcagaaaggcttttagtaaaagagtattcatttatagtattctttggatgcattaaaaatttcaatattccaggtaagtcagagacatttaaatgtcaacaaaattccataaaacgtatttcaatgagatcaagtcttcctagctaaaaattttattttatcagtaaatttagagaaaaatagaaaatcagtactttgggtcaaataacagtgtttggaatgtgagtatcacccagataaatgctcttaatcattattattaaagtagcaatggcaccacgtgctttcctgagacccgctggtctgttttccactgatataaagtgaagaaggcattgaaatagcgaagggaggtgatacaaattgaatactcacataaaatacaatttttaataaaaagcatttaatgttgtacaagtatagatgagactattagtatgaggtcataatatttttacttctattgacagaataactttattcacaaaatttttatttcaaataatattgttttttctgctgtatatttgcaagcttttagtcaaatgttatctgagctcaatagaaatcaacaaaatgaatctttatttttccacaagcattttattcaggcatatgcttatttttcttaaaatatgttagcttttaatgaatgatttatactttttttcagtgtgttgtttatcgctaagaagtggttgtcctcccaggaaactgctattctcagctctacctacattgactaatagtgagaggaagtgatgtgtggataagaagcaaatgtgtcttcactgcatctcttttttaattcgttcactgaagaaaggaggatgctaaaagaaaatgaaagaagatataagccctgaaagatcatgaagaagtcctcttaaccagaaaaaaaaacccacaggggatggtgatgtgagcagaaaatatattattttgctaaggctctgaaatttcagtaaaaaacctgcattgctttaacaaatatattgtttcttcagttttgattcttgaggatacgattcaattcactggtgaatcaaaactgagagaataacatatttgttaaggtaagtgatgtatggaagacccattacgttagaccaacatcttctccacctccagctgcagacaatcatcattccactctctgttgccatgagtttgaaagtttttaactttacacagaaatgaaatcatgtgtgtgtgtgtttcctgtgctggcttattttacttagcataatatccttcaggtttatcaatgttgtatcaaataacaagatttcctttttttttttaagggctgaatagcattccaatgtgtaaatataccacattttctagaagtgttttaattttaaactataaactatgactgttaaatacttttattttcatgccttcttttgattcatattttggctgattgacaaactatgttttaaaaaaatttcttggatcaagattattgatatgggaggggggcatggaggtgttaggtagagaagggtggggtccctggtgaggactctgcccacaggcctgtgcccacggacctaagtgagaacaggcactcttgtttttgcatgcaaatgttgcatttttcaagaccactctggcccaccatgcctccattgctgtgcccatataaaccaagaccttagtgggcacacacacaaacaactgaatgagaggagtagaagaacacagtggcagacagcagaagaaagtggcagagaaaaaggaaagaggcatctgaatgttgagaggagttcagccgagaatggccaaactccaggggaagattatctcctctccctccaccttcccactacagctccccatcctgctgtaagtcacctccactgcttaataaagtctctgcatttatcacctttcaaacagtatgtgtgacctgattcatccagaatgccagacaagaatccaaggcggggtgaacactcagctgttcctggatggcaaggctaaaagagcacactgtaacacacatccattgggctccagcatctgcctgtctgagtgctcctgcttccctcaggggtttgagctgtggggtgactgaacaggtgagccacacccctgttgcacatccttcaaggggaatcagggaactctcttgtttcagccgaaggcttgtctgggataatcatcagcagagtgatttacaaatgtgaaattgttggatgtgcctcttttgtaagaccctgtcacccctctcttttctcgggtaaaagcctttgtttcccttcacagaggtctcattggcacacgggactggagcagagacctggggcaactgaagacatcatttgctggaagactccgacactgaactttgtcagccaggacccccagacttcacttggtgtcttttcttttctcacagtttacagtggctcttatcacttcctttataatgttaagggttttgctacaggctgcagcagtgatattaaataaagtgagcatttggctcagctatcaaaggtacaaatcagagcaatgtggttttcatttagaggtgccatccttactcccaccctggtagccaaaggggcacatggcacaggacacctcctctctgtaccgcctcccctcccagctcaggtgcctggtgtgtccactgcatgcaaaagctgtgcccaacaaccatgaagggtggaagaaaaccacagctgcttctgggaccccacagggctggctggccagtgcttcctgctcaccacaccaacagaactttttaccctggccaaggaatacaaacagtctgaaccaacagaaagatacaatgatcaaagggacctatttgcactgtgcaagggctacctcctcttttgcctttaaactcctttttcttttcttttcttttctttcttttcaagtgaaagcatttccctccccagcacgctgcttctgacagggaagttaacagaggagtgacccctgctggcagataactgtaaatttggcagggctcatttgagacaatctaaacagatagcttcagccccttgaagtatttttagtcccaaatttgattccaagcttcaggttgagtccctagaaagaaaaatcagatctgagggacccaaagccaggcagcaggcacaatgtaaatgggcaggacaaaattctgctgactaaacccccgccccatggaaggaggccatgccccttggcataaatgaggcccagggaactcaaaggttgtcaacagcagggggagatggaggcataggtgaggacagatcattcttttgatttctttctttctttctttttttttttggtttgtttgtttgagagacaaagttttgctcttgttgttcaggctggagtgcaatggcacaatactggctcaccccaacctctgcctcttgggttccagtgattctcctgctttggcctcccgagtagctgggattacagggatttgccaacacacccagctttttttgtattttattagtagagacggggtttctccatgttggtcaggctggtcttgaactcctgaccttagatagtctgcctgcctcggcctcccaaagtgctgggattacaggtgtaagccactgcgcctggcctcagatcattcgttttctatgggccttccctgcttcatagatgaatgctacattggcactcatgggtggcacctgccaaggtcaccaggacttggtgataaaaagatgaaagagaaagggaaaatgcttgctttctctccccatcacaccttgagttttcactgaaagaaggaagggaaatgaggaatgcctgtattccctgtctttcaaaacaagcaagtagctctcttcaccactcctagcttatacttctttggagtgtatcctgaaccattgcaactgccttgaccctcagaatctggaggaaaaatgcttcatagccctctgtacacaggtttggccaaattatgacttacaacaaagactagcttggccttaggaatgaaccattcattctgatgccatgtggctattagaccttttctgcaaacatgagaacaagtggtctgaggcccgatatgtgcaggctttctatatttttcagggcaatcccaacctttgccatcagcgggattgatccagctttcctgtatgccatctcaggagaggctgccaggagcaatctcagggaactaaagaaacaaactccagatgttcccccagcagagaagccagttccctctagccctgctcatccaggccaccctgacctcccaattcagcttcagcctctcacttgccccctcctagaaattctcaccctagacaagccctggtttcactcttgctccttcaacagatgcctggtaaatttggccccagtaaggtccagatccccttctctctacagggtttaaaacatattaaggggaatctttgaaacttatcagatgaccctgaaagacatataaaggctttccagaatttcatccaaatatttgaactctcctggagagatattatgttacttttgaattagaccctgatggacagtgagaagcaagcccctttgcaggcagtagagagatttggggatgagctttgtgttacctatggcatgaggaaagggggcaaatgttattcaactggaagagaagcagtaccagtaaatgaccctggatggtattccaatgatgagatgggagactggatagggagacagtttcaggtgtgcataaggagggcttatgtagggccaggaccaaacatctcaattatactacgttatccatgatggaccagggatttgatgaaaatctcactgccttcttggaaaggctaagagaggccttggtaaagcacacctctctatctcctgattcagccaagggacaactaatcctaaaggataaatttattgctcaggcagcccctgatatcaggaggaagctgcaggaacaggccctgggaccagacagtattttagagaacctcttgaaagtggccacctcggccttttgcaataagtcactggaatagattcttgaattcattatacccaagtaaagacctgggaatctgatggagccacctctgtcaacccagaagagtacccaaagtaccaatgtgaagagatcagagacctccagctaaaaatcacaaaaggtaagtgttaataattaaccttccatggatttcctctttatagtcttgtctatgcttgctgttcttacctttgttctgatctataaccacagggcacaatagtgtttttagaataattagtatatttcactttttatttctgaaatctttggcactaaattctttactagtataatacatgttttacccctgcgtatctaaccttatggaagttttttttctttctcacacctagaggccatcaaattccaaaaaggcaagcaactgaggtctcggacaatgactcccctttgccaggaacccttaggtagacatctgggacaaatctgactgctgtttttctcaaaacaatgccccctattggcaggaagtagctaataccagtggtcatgtatattctaacggcgattagatgtgcctcttcagaggggaaaatgatacgggaggggacaaggaagtgcttggtagagaataatagggtcccttgttagggcttcatcttcaggcctgtgctcgcagatctaagtgagaacaggccctcctgtttttgtacccaaatgttgcattttccaagacccatctggcatgccatgcccccaattatgtgcccatataaacctgagaccttagtgggcacacacacaagtggctgaatgccaagtggaacagaggaacagagtggtggagagtggcagagtacagcagggcggcacagcagaggagggaaagggtgtctgaacgtccagaggagttcagcaaagaatggccaaacttcaggggaagattatcttccccacctccaccttcccactccagctccacattctgatggaagccacctccactgctcagtaaagtctctgcattcaccacctttcaaacagttcatgtgacctgatttatcaaggacgctggacaagaatctggtggggttaacactcagcggttactgagcagcaaggctaaaaaagcacagtaacacacacccacttaggacctagcatctgtccatcgacatcctcccccttctctcaggggtttgagctgtggggcgaccaaacaggcaagccacgcaccttcgcacatcctgtgaggggaatcagagaaccattacttcatcatcagcataattcaagacaaaatggtaatgaaaatcaaccttgattagtgaaacaacaattatctgacccctggtaatcattttcactcccacccaacatgaaagctgcatctctgtgtcacctctcccagttgtaaaaaagaggattctgataaaattaatcagcataaagttttctgacttttttggtctgaaaatttaactgatctcttaccaaaaaagttgatattttacatttatcattttactctattctattaaattttttagaaaaccgaatctgacaaagcatacatttaaaaattaaaaatacttatgaaacattcttatagaaactaaaactaaaaataattttagattcttagagagcatctctcaaatacttcaaattatatgcctttaaccatagatatttattttttattttgctgtgatacagtttggctgtcctttgtgtcaaactccatcatcatttttattctattttgttgtgtagtatttatgttatgcattttatatatttaaaagttgtagtcccggccaggtatggtgactcaggcctgtaatcccaggactttgggaggctgaggcaggcagatcacttgagatcaggagtttgagaccagcctggccaacatagcaaaaccacgtctctactaaaaatacaagcaaattagctgggcatggtggcacacacctgtaatcctagctactcgggaggttgagccacaagaatcgcttgagcctgagaggcagaggttgcagtaagccaagactgcatcactgcactccagcctgggtgacagagtgagactccatctcaaaaaaaagaaaaagactaacttgaaagtgaagaagcttggcagtcaccaccttaagcaagtgatcaaagtgagtatcattagaaatagaataaatcaaattctgccccatagaatacaatgagtagaaaatggcatcgcttctgttattcctgccaacgatgcatatctgaatctaatggaaaggaaacggacaaatgcagatcaagacacacactacaaaacaactggcctgtcacctccaaacatgacatgggtttaagtcacagaagcaccaaggaactcttccagactgaagaagacagcagacgcatggcaactaaatgcaacgcatgattgtcagctgggttcttttgctagaagggacaatactgagactactggtgaaacttatatgggacctgaggattgcatggcagtaacacaacatcaatcccctgatttagtggttgcattgtggctatgcaggagaatgtccggttgtaagaactgtacaccaaagctttaggggtgatgggacatcaggttggcaattgaccctcaaatgggtcaagaaaaaagttctttgtactgtacctgcaaccattctctaagttgattattgttttggaatgatttattgtaaacatttatttttaaaaattatttttaaaatgacattttgaatttcaaaggatgagaaattcttgacaaaactgatgaaatcttaaaatgcttctgcaaatcaggcctcagaagtcatgctgtgtccggaatgggtgggtgtcttggtctcactgacttcaagaatgaagccgcggaccctcgcggtgagtgttacagctcttaagatggcgcgtctagagtttgttccttctgatgttcagatgtgttcggagtttcttccttctcgtggtctcgctggctcaggagtgaagctgcagaccttccccgtgagtgtcacagctcttaaggcggcgtgtctggagttgttgttcctcctggtgggctcgtggtctcgctgccttcaggagtgaagctgcagaccttcgcagtgagtgttacagcccataaaagcagtgtggacccaaagagtaagcagtagcaagatttattgcaaagagtgaaagaacaaagcttccacagtgtggaaggggacccgagtgggttgccactgctggctgaggcagcctgcttttattctcttctctggcaccacccacatcctgctgattggtagagcccagtggtctgttttgacagggcgctgattggtgcgtttacaatccctgagctagacacaaaggttctccacgtccccaccagattagctagatacagagtgttgacacaaaggttctccaaggccccaccagagtagctagacacagagtgtcgactggtgcattcacaaaccctgagccagacacatggtgctgattggtgtgtttacaatccctgagctagacataaaggttctccacgtcccaccagactcaggagctcagctggcttcacccagtggatcccgcaccggggctgcagatggagctgcctgccagtcccgcgctgtgcgcccgcactcctcagcccttgggtggtcgatgggactgggcgccgtggagcagggggtggcgctcgtccaggaggcttgggccgcacaggagcccacagagtgggtgggaggctcaggcatggcgggctgcaggtcccgagccctgccccacaggaaggcagctaaggctcggtgagaaatcgagcacagtgccgatgggctggcactgctgggagacccagtacaccctcctcagccgttggcccaggtgctaagcccctcattgcctggggccggcatggccggtcagttgttccgagtgcagggcctgccaagcccacgccgacccggaactccagctggcccgcaagtgccacgcgcagccccggttcccgctcgcgcctctccctccacacctccctgcaagctgagggagcgggctacggccttggccagcccagaaaggggctcccacagtgcagtggtgggctgaagggctcctcaagtgccgccaaagtgggagcccaggcagaggaggcgctgagagcaagcgagggctgtgaggactgccagcacgctgtcacctctcaatacttgatagaagtgacatacactgtgtataaaaatctcaaacactgattcctccttggtttgttttacaaattagcactcttccaattaacaaacttggttagctaaaaacactaaaaactgagtgtcttgttcccttttgtgaataaaattccagccagaacatttgttttttactaggaaacattagtccccactctaaattaaagtactatacgtggcctatgcccgggatcaattatccttggaaaacaaggacctcccgtacatacttgctactagtactgccaagcaaaggcctgctatgctactgcagaggctcctgtcccagcccagatccaacaggactggcaggaaggtgtagccaggggggtcaccatgagaatgacatgatgatacctacctgacaaggctcaatgagaattaaatgcaagtcagattttcaccttgatactagcatttgtggaagcattactcgtttttgttttgttttgttttgtttttgtttgttttgtgtttgtttgtttgagacagagtcttgctctgttgcccaggctggagtgcagtggcacgatctcagctcactgcaacctccgcctcctgggttcaagcaattcttctgcctaagcctcctgagtagctgggattacaagtgtgtgctaccatgcttggctaatttttgtatttttagtagagacagggtttcaccatattggccaggctggtctcgaactcctgatcttgtgatttgcctgccttacctcccaaagtgctgggattacaggcggagccacctcgcccagccgaagcattactcttattaacttaaatatcaggtttgaggtctagctcacatcatttcttcactcctttttgttctgttctcagtcattccatgacagttcatgtagtagtaacaggatttctgtctcctatgggttgactggcctgggaaatcttttatctcaagtggtcagaatgtgaaaatctagactaagcatatgtacaaatgaattcttagaacacagtaatcaaatcagaaacaaaagccaaggccaccccccacccaccagccagcaggaagcctgcaagacctcaaatcagagcacagcattggtgagagccgagtgagaaaactcaaaaactctggctgcaaacagagctggcatgcctgtggcttattattgctcactaatcaatgttgattgctcatgagtccagaaaatttgatgatatctgttcaactgaacattgacatgacaggtactatgccagatactttgctgacatgatgtcacttgaagttagttatcttatatacagggtaggtacaattattatactcattcttcagacagtaaaactgaggactagagaagtcagtagctcattcaaggtcacacagctagcaagtgctaaaaccagggtttaaacctcagcaattggtctccacagcctaccctcaacttctactctaaactgcctctcaccaaccataatttgtgactcaacggcacccagtctcttatatcacacatgcgacatgtttgtcacagcacacttgcttcacatttccacacaccttccttatttcaacagtaactgtgttgcagggtaacataaagcatggggcctcatttgtgtaacactagttcacagcaaaggcaaaaagtccaccttctggacttggagacgcatgctgctacttctgggtttctctttagttgacaaagtaataagagctgttacaataaacttctttgttatttcatttaaaatgttgcctttttttgccaggcaaaaaaaaaatttagtataatcatgcatgcatgcctctttatgtatggcaagctacttacttcttttttctagagatcatagggtccagaaaacctttcgatgggttaaatagggtcatttaaaagagaaacttaagtctacattggatggttctggaggagtttccccttccctggagctgctcaccagttaatttaggaataaaatagtctcccaacctagcaaatcccaccaccctacccaggggttttcacaaaattatcttgttttaatcatgttttagcatggaaaaatgacacatatctcaaagtatacattttgaggtttttgatatgtatatggctaatttaggaaggaatattttaccacactcctggtttaggagataactccagtcacagatgtcacactctggtgacaagtgtgtgccagctcaccactgccaccatctgcctagggcctttcctcttcattcttcaagccaaaagcacagctgatttgttgggtaatgtttcttgatagctctctagccaaaaatatatgtggttcagaagtgttgttactatagctctactcagctgggtctcgtttctggaaaccatatttagttgtcaaacagtataatgtgacagaaagattttgatgacttaaaccaataaatttcaaagttttcaatagtaaggtttcatttaagtgataagggcaatgcttaagttatgatggcgagaaaaacattgctcaattgactgtattttgttcttctataatcttaaaatgttccacaacaggcaactgcattaaaaatattgtagcatggaacagatcctctactttacaatgaacaaagcacttctgttacacaattaacatgcaaggaaaaactaaggtagccacctgcacatgtccaaacactgtgaccatatcacaacccaaccatccagtttggccaacaggaaaatctactcctgctattgcagaatgacatctgtcttctggtgtcaagcttggaacccacttatttgacccatactgctattatttaagtttttctgctccgagctccatcttgagctccaagctccatcattcctgagctccatcttgctctcagctttctcttgctccagcctccatctccttcaaactccatctggtttggagctccatttggctcatagctctatatgctctgagctgcatcttgatctgagctccaccttgctcggatctccatttgctctgagctccatctgctctcaactccattttgattggagctccatcatgctcagagttccaccctactctgagctccatctgctccaagctccatcttgttttgagctccaccttctttggagctttatcttgctctgaactccatctggcttggagttccatctgctttgagcaccatcttgctccaaaatccttttactccttgctccatcttgcttgaagcttgactttgctcagagctccatctgctccaatctccatctgtttgagttccatctgctcggagctccatcttgctaagaattcagagctcctgctctgagctgcatcttgctcggaactccatctactcatcttgcacagagctccatctgctcagagctctgacttgctgggagttccatcttgctcggagctgcatctgctcagagatccaacttggttgaagctccatctgttcagaactccatcttcctgagagttccacctgctctgagctccatcttgccagcagctccatcttgctcaaagctccatcttgccagagtgccatctgcccagagcttcatcttgctctgatccagctactctgagctccatctgctctgagctccctcttgctctgaactccatcttgttcagagttccatcttgctcagaattccatttgctctaaactgcatctgctcagagctccatctgctctgagctccctcttgctctgctctgagtaccatcttgcaggagcagacaaggagttcaagtctgtttgtagggtagtaccatgctgccaggttaccgctgggtagtttcccctgccctgcagcatgaaaaccaaaaggacgtttccaaggtccataagatggaatgggtcagaaagaaaaacaaagttctgatgagcaggacctcctcccactaaggctgacaaatacaagatgaacacacagtgagggaggcacccatgccccctgggcttgggaggccaacaagagctgcccacacacccatcacaagtcatcacccagcttaggggtgacttgtttttaatctgaaaggtcaatgttctacagcagagcacaaagcgcagatgtttccactgaactaagagacagtgtgggggcagaacttagcactatgactggcacattgcactcaaaaatgttggcagacatggtggtccttcccctctgctcgcctctgtcctcatgagccttgccacctggcatggcatgtgtctgcctggtgcaagcatagcccatctggctgggaacttcctgaggcaggagcacactttgcacatctctgtattcctaagaacccaaaagcaaatgcaacaagaacaaaaataagtaaatgggacctaattaaactaaaaagcttccacacagcaaaagagataatcatcagagtaaagacaactcacagaataggagaaaatatttgcaaactttcatccattaaagtactaatatccaaaatctacaaggaactcaaatcagcaagagaaaaaaggaatgtcatcaaaaagtgggcaaatcacatgaataggatctgagccccctcccagccctcagaggtgtcatctttgggagctccagggagatgtcttggggaaaccctggcctttgggacaggtgaagtgcaaggccttcttgggcattgctaggtgggcctggctggccagaggggtgcagaggacccaggactagcaggaaccctggctcgtcactgtccttcattctacccatcctcaccccaccctcacccaggaccctcactcagggccttttcctcctcattcacctctggccttgcagagacagattcctccttccatctgctatatcatccaagcctcacggaaccatgcagggaggcaggagagggaggaccgtgcccatttcacagcatgaacattgaagctcaggagatcaagtggcttgcccaaggtcacagtagccaggaggtggaagagctgttgcttgaagccagggctctagactccaagtccagtgctcctcagttccaccctcgagcttcccttcctttcctctccccactgctacccaggcccctctctacaaccacctccactccttctgtctttcctcttttctctttctgtcttttggttccaccaaacccctgtggaggtgaggcaaggaatgccccatgaggagaaagggaggggtgagactagagcagggagctggaaagtggaggtcaggctgctgtgctgcaatcccagcaggtggcctctacaccatggtttatatgaatggagttgtgcaatgcagggcctaggcagctggatgctgcaaccctagagacagggaatggtgctgagctttggagtcaggatgaagcaaactccagggcagtgggaaacttagaattgaacaggatgggtgggcgaggtcctggccttgtgcttgttccagtcaacttctcaggagaatccaaggcttggacaaagatggcactgggagagagcaggcaggctcagtgtggccaaggagtgggggaggatctgaactcggcaggggtcttgtatgcagcaggggcttggtccctcacaacatggagcccagggaatgcttggcagcacctgggaggtgccaatccccagtggcagtagagagggctggttccacactcacactgtcttctgttctatctgtgtcagcatccctctctctcctttcccatgcctgtgacatcctctccacccctggattcctgtccctgcttggctgccagcccccttctcctccccacccacgactgctcctcctactgtccccaccttctccccaggtgcaggatatgcctcttcacacctgacctcgcttttgaagccacagtgaaaaagcagatgcagaagctctaagagcccagtatcaagtgtgtggatattgtagtcagtgagttcacagccaccatcagaaagtgcagtgaaaaggtaggacagatgcctgggtggggctggacttgaccatccatcctcgtggccatagcttcctgtagccagaacgatctgctgaccaggcctctcagccacccacagggacccagccctagtgtgtcctgccagcttctaaccctgggtctatttgcacttttgaccctccagacccccatccctgcccaaggactttactccaacccaagtttccttggtggcatctttgcatcaataagaatgccagtgattaaaatgatgttaaggagatggcagctgtttattgagcacctactatgtgctgagtactgggctaagcacttgcccttactatctgactcagtcctctcaaccaccctaagacatgggtagtgttgtttttcccatcctacagacagcaaaacagagtctcagaaaggaaaagcagagagtgattcatatttaggaaggtcagaggaagggttctgaggtctggacctcctgggcacagggagctgtcttggttcctcaaaaccaatttgcctaaaggcatattaaattacttgctttacaataatccacatgtgatggggcagcctcttttgagttgtctgtaacttctttttgtttgttttttgagatggagtcttgctctgtcgccaggctggagtgcagcggcacgatcttggctcactgcaacctccacttcccaggttcaagcgactcccctgcctcagcctcccaagtagctgggactacaggcacgcaccaccatgcccggctaattttttgtcttttagcagaaacggggtttcaccatgttggccaggatggtctcaatctcctgaccttgtgatctacccacctcggcctcccaagtgtctgtgactttttagatgcctttttcctatttgtctgcttttgggcattttgaggatttttaaccaggttttctaaagcagttcttcccaggggagtgcaaaagaatcaactggctgtaggagcttctccagcagactgcatcagagctgctggggcagagctcagccttgcctgtatctgaaggagttcgctatgctggggggtggaggcacatcctccttagcttcaagtttcaagtaagcatcaatcatctcctttcttttttactgagcagtgtgttgtggaatccttgtatattgctacacaaagattagtctcatgccccccaccttttttttttttgagacagagtcccactctcttgcccaggctggagtgcaatggcatgatcttggctcactgcaacctctgcctcctgggttcaagttaagtaaagattggtctcatgaacttgaactttacattcaagcgattcttcttcctcagcctcccgtagctgggattacaggcacatgccaccatgcccggctaatttttgtatttttttttttttgtagagatagggtttcaccatgttggccaggctggtctcgaactcctgacctcaaatgatccacccgcctcagcatcccaaagtgctagaattacagacgtgagctaccacaccagctggtctcatgcccattaactgctgagttgtatttcacatgattcacatgttcgatgtcctattgatggacatttaggtttcaacttttttacttttttcttttttttcttgccttcacagtgctacaatgaacatctttacacatgtatttgtagtacttatcccattgtttctttcttttttagagacagggttttgctgtgtcacccagagtgaaatgcagtggcacgatcgtagctcactgcagcctcaaactgggctcaagcaatcctcccgcctcagcctcccaaggagctgggactacaagcgtgcaccaccacacccagctaatttttttgttgagacaagatcttaatatattgcccagcctgctctgaaactccaggcctcaagcaatcctgctcagactccatcagtcccttcttgatagatatttgggttgtttccaaattttactgtaattacttctttccttttggaaggagaatcaaagtgttccatggtttttaaatgtttatatctaacaatcaatcttctaggaatctatcctaaggaaaaaatcctagagaaagagaaacaaaattctttatccacaaagatattcattgttaggttatttagaatattgagaaatcagagattattaaaatgtccactaataggacaatggttaagtaaacttaaataaatctatccaataagatattatgcacccattaaaaatgtttatttaggctgggcactgtgggtcacgcctataatcccaacactttgaaaggctgaagcgggaggttgcttgaggccagaagtttgagattaccctgggctacacagaaaaaccctgtctctacaaaagcttaaaaaaaattagccaggcatggctgtgtgcacctgcagtcctagctactcaggaggctgaggcaggaggattgcttgaaccgaggagttcagttaaaccactgcactccagcctctgcaacagagtgagagaccctgtctctaaaatcaattttaaaaaagttagagaccagcctgggcaacataggaagaccccatctctacaaaaaataaaaaagttaggtgggcatggtggctcatgcctgtagttccagctacttgggtggctgagatgggtggattggttgagcctgagaagtcaaggctgcagtgagccatgattgcgccattgcaccccagcctggaagacagagcaagaccctgtttttaaaaacaaaacaaaaaagggattcacatgtcccgccacagtgtactgtgggaaaaaaagggagtttctgaaaagaatgtatggtattttggagaaaaaatagtatttatgaatgataaaatcccaaaggcatattcaccacagaaatattttcatgtccaagtcacaaattttagccatgctctaatcttttacagtgagtctgtgtgatttttgtgggcagaaaaaactgatcaacaaaatctttgaaaagaaaagctttagtctaaaaggaggaaaataatacttttgccttttgatttgtttaaggatcataattattttttctttataggcaaaactcacccatctttgtatactcatatttttcctctccaagtttctaagtttagcaagccacttctgccagaggtttgataagtgttaataagtgaatcctaattaatcctagccctgctgggattagacttgccatctctgaataaaatctagagtttaaggccaaggtgggtgggtcacttgaggtcaggagttcgagaccatcctggccaacaggatgaaaccctgtctctactaaaaatacaaaaatgcaccctcaacagaatcctaacaacaactgagatctggccaggcactccccactttccccagcctctgccttccaagcacaagctcattgaatccaaacagccttcggtggtaggtactgctatcaaccctcttcctgaggcccacatgaccaaaccactcagccaaggccacacagcaaggcagtgctgaagtgaggattcaaacccaagcagaccagcttcagagctgtgccatgcaacccagaggcatccgggagtccaaaacacgggccctggtgagagagggctgcacaatgtgtaccctgaactgtgcctcctcacacggcccagacaacccgcaggaggctgggactaggccagaggcaggggggtccctaaaagtacaaagtcccagtggcacaaggtccccaggcaggactggatgtcaagtgatacccacctattaagggctgggttttgggctatctcattatcatttattccccataaaacaaaaaccctgaggtagggattcttttatccccatgtgacagatgaggacacagactcagaaaggccaagtgactccccgaaagccacacactggttagcagtggagccttgattcaaacccagaagggcaaacccaaagccccttcctctcacacctcatccctcctcacctcaaggccagtttactgagcagagaggaactcacgcttccagattcaccccatacatttaacctgctgcgcagcaaatgcctggactttgcctggcagaaaatgatcatgaaatccctgggatgggggcagcctgggccctcaagaaacatcccaacccacattcccattgcccttgttgaggaggtcagtcctgggaaatcctactcccttgttccttcccaggttccatctgagctaagtgcctccaggaagggcagggagccccatctccacacacagcacgggaagagggggtgtgacacaggcctacatcagaactctcaccagcctcagcccctgcagacccggtgggactgggctttgcttcttgttagactaagggaaagggggcttcaatgacagtctagctcactagaggcagaacaaactgccaccagttccctgcccacttcttgcctggagaaaacacccgctcctaggtggtgagtgtgagcagcaaattcaggcccacgtgggccaggtaaattgggctggctgccatgcccctctcacctctcccaggcttcccgcacaagcacgcaggcaggttgcttcagccccaaatacagcagcagaggtggtggtggcaaagggtggggcaggaggtggagggtcaggcttacagacgggacggaccctcaggcacagtgacagcagcccagccactagggcctgtccacaagccagggctggccaggatcaagcgagtcactcagggtcctcccagctccttccttccctccaacactgaaggctctcagaagaaccagctccaaaaagggagcttgaagcctctttccaacctcccagtgcccacctcagaagcagggctgagggcagagatgttttataagccaggacccctccccatgcaagggtcgtatggaccggtgtgtgtaggggcagacctgtgactgacatccacctacacctgaccctcatctctgaactcaccccacttccttgcatacattgaagaggaaatggcccacactccatgaatgccggggtctgaggtgggtgacggcacccatgagcccctgccagagtctgtccacttcccaacagacccctttcccaccttcccatccccaaccatgccaaggccttcagggatggagaatgaaatccttcctcctgcctcacaggaaccactcacccacacctgcagcctctttccatacaggactctgggacacagggccatcagctccagcagcatctaacacgagcaggtccacagcaaccttgctggtagcctctcttctgctacttcctgggtccacactcagcctaggtgggaccagcctcccccctgccaaggtgaggacaggaagaggcatggctagggagctgtcagtcatacctcatggtggtaggcagcatttaaagccaggtggcacctctcacctggttactcgtcaccccactcacacagcctgacacagcctcactgcctccccatactcacagagaagcagattcagctcctgctgctctaggctgggaaaggagcagcgggtcagcctctaccctctttctctgagaaccagaccatgccccaggctgcacactgctggcagaatcagcctagggggtaaaaagcttgggttctcagcccactccaggaccaggatggggcctttcatctaggcttctgacacccacacactcggaggtcctggtccccatggtaccccagtgcccagcacagagcctggcacagatcaggtgctcaaatatgtgttaaatgaaaacaaaataggatgagatcagtcccttactcctactatatgaaactgcttctccctccatcgtatggcgtgtggaccaggaggcctcgggtccttccggaccagacagtctgtgatagccatgagcacctgaagcctggggtccatggttccctgaacctgttacaatctctgccaggcagagaatgcactgaccagctcccagagtggatagggacccaggtgtccctgagccatcccaggtgccagagcgtgacctagctctgaatggagacacaggtttcttctggactgacccaggactggcaggagcaggatcagaagggccaccttaacctgctcactcctcctctgtaccagccaaatgtccacagccaggccaagtgtctagatttgctcagcctgacctctcgacacatgttagcacaagtggtttcccacccgtctttgttgttgtttagcatctgttgagggctaagtgctggggtgaatgcctcgcctatatcactcaaccttctcagcctatctatgaagccgggtttttgtttgtttgtttgttttgttttgttttttgtttttttgagatggagtttcattcttgtcacccaggctggagtgcagtggtgcaatctcggctcactgcaacctctgcctcccaggttcaagcgattctcccgcctcagcctcccaagtagctgagattacaggctatgccaccacactcagctaatttttgtatttttagtagagatgaggtttcaccatgttggccaggctggtctcaaactcctgacctcaggtgatctgcccgccttggcctcccaaagtgatgggattacaagtgtgagccaccatgcctggccgaagcaggtattttatcatgactctgcagacaaggaaataaaggctcagaaagattatgtcatatgcctaagatcacacagcaggacagtgatgggacagaatcagaactcgggactgtcagcctcagggcacactcccctagaccagcacccaagtcagactatgcccagccaaccctggacatccagggctcaccccatggggtccaccacatctctgggaaagctgcatgatgggctgcctggaggcagtggccaggccagaataacccatgccagcattcttccatctcactcttcccgagaccagcctccagccctgaccctggggtaccctgctgccttagccctttcccatcctggaattagcaccaccaacccaaggggcaatatgttgattccagaacaggcagatgtgctgatgaagagagaggcagctgctaggactctcctacctgtcactgggccaggtgtggaaggaggggcaggagccaggggaaagcagagaagcaggggattacacgacagagcctttgcaggggcgagggttacatatccggactaggagctccccagagcccactgtctgtcccatccacccaggtgctcatgctcccaacttgttagtgccaactcctggccatgggacagcaaaacctcagacaacatctactcatccctcaaccaacccacgtcaaatcttgcctgggcccagcccaatctcttctacggcctcctgcctcatctccttccctcaccccctgccgttcagctaacttcctaaaacaaaggtggcaattgtgccattcccttccttccaacctactgtgcctatccatcacctggctgggcgaacccttccacctttctctacccacatgtccactacccacacctctccagtcaccccatctctccaggctcttgctcttgcagttttcttggccaagtaagtggcccttcccaacagagcaaaattctacttacatgagaaggcccagctaccccttccccgaggctccccagcagactcatggcagcatccctgaacccacagctcaaagttctgtggacatcaagcaccgtgtcttgttggagaaccacttgtgtggggttgacttcccagcctcacagagcttcctgagggcagggctaggtctgattcatctctggagtataggtgtagagcagaacctggcacagagagggaaccagcacaccctgttttaactgactgcccagtgagcctggtcagcagacattgggtaggccgtagggcttgtccacttgagctttccaggcaaaaaaaactgtcagagctggggattcgtgcttagtttggcaaggctcagtattagaggctgaagaacccttggcagaactgccagcccatccagttgcggcagtgccaccccacagcatagcaagaggctacattggcaagccctgactcaccataggttgtaagaacagccagacgcccatggggtgctagtgatgctgggttcatctatgactgcagtactctggacattctgagctgctcatctggttccactagatccccaggccctctcccaactaggcggtttgaggtctaaggaaatgccatatcccctgggtatggagcttggaatcttacctcttcagccattctgctgacccctaaccctgcccttttagccctcaagggcctacaactaccgcaggagagctgaggggtggaaagcacagaaacagcatgacataagcccaaagagtggccagaatctgaatggcttgggctgatagcactggccccaaatggagatggaaagagggatgacaacaagaggaagcagcggaccaaagtctggcagaagctagggactcatagtggtatcatccactgtatttgaaaatccttgagtagccgtgggcaaggagaactagactcagacaagtagaaagcccgcaaatggattcccggggcagaagtccaggctaaatctggaaggcgcttcaagctcacaggggaggggtctgcagggccagctggaggattttcctaccctttcctcagcaaccaaaactaccctccccaaagaagccctggcccactaggtccatccatggggcagaaccccatggaggctccttaccatgcagggttgtcctagtggacagcgatggagcagagtttgggggagatgctgcagctctggtgagaagccacccagtctcaccatagggctccacatggaacttgtagggatggggggtgagccggcactcactgccaccccagccaactgccctgagtacccggcaaagcccagcagcatcagcagcagtaacagagtcaggtccagtagtaacagtaacaggtccgacatggctctggacccctgcaccgcaccccaaggcagctgcaacagagaaagaagggagaggaggctggtagccatctccaacaatgtgcccacctgaccaccaaccagttctgcccccagctcctcagccctgccttgggtgctttgacccaggaggtggaggggccagaggtgtcagcacatagtgacctagaagagagctataaaggatgactgaagccacaagcctctttatttcttaatcacagtaggtgaggatctcagaacagctttacctgtcagctggcagccctggtcacacctggggaaactgagtcacagaggggcacagaagtgagtcatccagggacatactcctggcctggacaactctaccccaagatatggcagatgccagccagcctgcctttcttccacaataccatactccttgcctggacaagtctcccccaagatgtgccagatgccagccagcctgcctttcctccacaataccacttctttcccacagcagagccacactgccagtccagcctcctgaagcctcaggggctactgccagagggagggcagacgaataccagggtccacacacctatcaacaaacagggaaaccataaggaacaaaattccctggggggaaatgtgagacgggaagagaatttcataggaaactctcctttgctaagtacatctggcctgcagggaccttgctctccagcaagctcacccatccagaaccagagggaagaccacagcaaaatggcctgagcagctagaacaaagtccaccattaagcttcccagacttgaaccacccatgttaacaagcctcatcctaattttctaccccgaagaaacagtgaggagtgagaggaaaaggttgccagaaggggagtctcagaacaggaagcagtaacagttacgcatagaggaagggaagctgttcaagagcgggcccaggaacacaacacagaaccactgtgtgagctattccaggcaggctgcctaggtttccaggcagctcgggaccagaggcctaaccctcttacacagaggccttgacctgagttgcctggagaggggggaattgtagcccagagaatactgtttaaagaggaagggaagcatgtgacccactgggggaacattcccaccccaattatttaaaactaatacttaacatttaaaaggttttgaagctgaaaaggccacactgcagctttgtggaaaacttagctctgtggaaatatttgttccctgtaggttctgggtgttgattttacatttaaaaaaattatttttggagtcaatgaacacacagtatttgctcacaaagaggcaaagtaaatttctttctttttttttctttttttttttgagatggagttttgctctagttgcccaggctggagtgcagtggtgcgatcttggctcactgcaacctccacctccctggttcaagcaattctcatacctcagcctcctgagcagctgggactacaggcacttgccaccacacccggctaatttttgtatttttcgtagagatgggtttcaccatgttggccaagctagtctcgaactcctgacctcaggtgatctgcccgcctcagcctcccaaagtgctgggattacaggcgtgagtcaccgggcccggcaaaggtaaagtaaatttctaaacttttggtgtcaggacacagaggtgctgcccactggtctcagccatctgtgctcctacccatcagtatctctctctcttttctgcctgtcctactcatcttgtctccagttagtttcattcctgttgtctttgatgataatgataagaaatcttccaccgagcacttactatacgccaggcactaagtgtcgaaacacagctgcttcattcatcctcaaagcaatccgacaagacaggtatggctaagggcgcaagaggttagaggttaagagacttgcacaaggtcacacaggtattaaacagagccacgtggaccaaaatgcaggcaacatgaacccaaacactcagactccaggcccccatttccacttcctctctcctctctggtgactggcttccagaaagactcaagaatttaatctttgttggacatctctgagcccaaagctgcaaaactcttagcatctaggccccccacttgccatgggaatgacaagccctcactctgatctgccatctcagctgagcacttcctgtcccctgaagggaacttagtatccacctttctcttcttctcacctcccaaactgttcagaaaggggaaaaatgcacctgcaggccccagggctttggtcagcacggggaggggtaatgtaaatttcccctgtattcaagagaaaaggggccgggcatggtggctcaggactgtaatcccagcactttgggaggccaaggcgggcagatcaccagaggttgggagttcaaaaccagcttggccaacatggtgaaacccggtctttactaaaaatacaaaaattagccgggtgtgctggcgcgcgcctgtaatcccagctactcgggaggctgaggcaggagaatcgcttgaacccccagaaggcggaggctgcagtgagccgagatctcgccgctgcactccagcctgggggacaaagtgagactccatctcaaaaaaataaaaagaaaaagaaaagagaaaaggaagacgggctgggagcttgcctgaaactccaggcttacgttagttaactcatggcctccagtgtggccggtacgagtgcttcaatgccgggagctgaaaaggaacagtcactccggaacaggaaataacctctgagccgagcaccacgccctgactcccttcttcagggaaagccccccggggcctctgaagcaccctcgccccactctcaacccccttgggggaaatcagaagccaaacctagattcacagtgtcagggatcttccctagagtctgggtcacgcccctcttcctggagggcttcaggcacacctggcgcccaggaactgccgccgaccgggctgcgccctctctcaagcctgggtgtcccctccgctcagaggtcggcgcgggcgagcgtcagggaaggctgtccccgcgggcttcctgctgccgaccccgtgcgcggggcccggaggccgggtcctttagggtccccgccgcaggctaaacttcagtgctggaggtgcaggggccaccgcctcgcgcggtcggattccagcccctgctcaccctgtcctcgcctgttaacttacagcttttcttgtctcccacctccttgccgagtcccgcacatctgtaacttcagcgacgctgaagtttgcagcccgcgtgagaggcgcggccctgggggacagggcagagttaaaacgcgactcgggcctccctccccagctccactgccccgggcgtgccctgagcctgcggccttggcagtgggcccggaagggtgggtgctgccccaaggtcgcatccaggccctcggaccctgccggggccagtagtgggcaagacgagactccaagagcggccgggccgctggggtcactggggatagtcctgaggtcttgccgggtaggatgggggtcccagacccacgctccagcggggacgccccgactccagcccggccccggctccggaccggccgggtctccgacaccgtccgccacgcacgccgatccgccccctctctggcagaactgggccctgggcgtggccgtggccgtgggcgtggctctacccatggcctgagcgcgcgggacccggagggctgatgcctccccgccccgtctccacagcaacgggcgtgtgcggggacccagagctggctggggtggaaaccgcggcctactttcccgcctccagcaaactctgcaattgctgaggttgatttagcagcacccaagggatctgggtcggcaagagcacctcagtgacagcctggcaccggggtccgcaggagaaggccaggctggggccagggagctgaggctgaggaggagcgtttgcacaggctagggagacacggcacagcagtatccgcctcagacatttgtagcaccgttagtcctgccactttctctcactgtagcttcgcaacagacttgggaaccaagcaaggcatggctgaggaagcttaagcccagtctgggctcgcggaagaagctggtggatccaaatatctgcttcctgcctccacccacccctccccgctccgtgagcacattcatccatccaacatttatgatcactccctgccagggcaattctaggggctggggatacagtgaacaagaccaaggctccgccctcctggagtccacatcccagggacatgcccttcttccaggctcctccctcagtgccctggtggtggctgggggaggctggtctgcctttctggttagcgatagcttaggtgactcccaggtcaagtgtaagctccttgatgatggcaggaaactggtggtggaaacagtcagtaatcatggggtggttcaccttgtggatcccactactgcattagcaaagagcaggctgggcacacaggggcagtcatcatcccgcttcctttctctctgcttcacgttcttccttccgcaggcaggggagatggaacctggtccacagggccaagcctgtcccagccctccaggcagaccggcggaataggtagctggcccctcacaggcactgcgatccgggtcagtgcagatcgcggcagttattttacctatgaacgcccagcacaccgtcaaacgctcagctcaggtgccccaggcgggcaggcttttcacttgggagcatttcctttgacacaaaggggaccatggcactggctcagagactaacagcctctgcctgcagggtctgctggtcagttctcctgcttctcaggaggtggtcaacttttcccaggaagccattgtaaggaggcgcccattcttcatcttgtcctctctgctcacttcctttagcgtggttggggaactccagagccccacatcacagttcagcacgtgcctcaggagcttcagcacctccttcgtgaaaggagagtctgccggtaacgggggaagcaggccatcagcctgcccagcttcatctcaggccgcttccaacagcgccaagcaaactcccttggcaagatccatgcaaggccgcggctgaccaccgggaggcagcagcctactctgcaaggcactctctttacccgacccccacccccttttaacaggtggcaggaaacctgctggcccagccatctgccgcacccacccttcactcccagtcccatctccccatagcacagatttccctatcatgagcccagacgtggcctgcatctcctcttgccttcctctgcccaaggaatccctacagagattctttctctatcttcctttatacatttccacagaattgtttccccagggcccctccccttgaagaaattagacaggaagctggagtagatggttccctctttcccacctctcacactcccaagctctggttaactctctgtgggccagtggctagattccccaacacagatgacaactgaacaatacacatgcagcgtaagaatgttgtcgctgccaccagccacttacagatacaccattgctaaggtccacccaactggactgtttcccccttccatagactaagccccaaaggccaaaaataaaaccccctaccccaaacctgcctataactgtttgaccagaggccagctgtcccaggatgcggttaagatgtctaccttgcacaacagaactggcaagaaaaacatctccaggaagcggtcagatacacggcacaaaggactcccccctccccgcttttccttttccttcaccctgacccagttctacgccctgtaagacgttgctccagcctataagtggggctgcctcctctgcttttgtcaagagatagcccggcaggactgacaataaatcagtttgcctgaacttgggtctattggcctcattcctttcttggctgtccttccaattatcccttacaaccatctcccaccctctgaaggcactgcacccaatccccagccgttcgcagtctggtcagggctgtctgtgcaggacttgtcatggctgaggcccacatagcctcaagccactctgaagtcagcttgctgtttcccctggagcctggaaatacatccctcttcaggtaaacaaaagcagaaaaagcccagtgaaccccactgtaacaaagaaactgccagcaatcttccttctgttcctgcctgtctcaccacccaaggactatcgcagagcccactgtgttctaagatctattcttttcactaccacccagccaacccggtgtccagaccattccttgatcaaataacactgtcttctggagttttaattttatcttacaaaaagtgaaataaggaaaactgataggcaattatactgacttacaatttttctgtttgctttttttttttaagcaacatgaaacgccagtaaaaataaatatgtcacagaaacagccacttgtccagtctctggggcaagaactccagccctgctgagagaagggaagcccaccatcaccccagcagctggatcgccaagccacagatgctcctcaaagccaggcacaggtcccaggcctcaggggcatcctgaggaaagaagatggaaaaccaaagccagttgcccagaccctggggccacctcatcaacccccactcctcctggcagccgtctggccttagtggttaatcatttgcggcatctccgcctttgcccacctggaccctctttccctgacctctctgaagagggcacaaggaaaaaacctgtcttgggcaggctggggggattcttccagtgagtccccagcccaccctgagtaacacaaccagctaacagtcattttacacccaggtgcacatgagcacagcacacacataactctctctctctctcacacacacacacacacacacacacacacacacacacacacagctggactgagctgtcttccaggaagggtcttgggtctggtcacagtatgaggtcctctctcttctgaatatcatctcaatagtggtggcagagagaacccaaacctccccaagcccctgcattgcagactctgtagccggcctggctacccctccccagcacacaggattactatgtccaatagacctgcaaaagggaaaggagcacactcaggacccggaagagcaaagaaggtggacactgtctgctcaggacactcttcgttgtaagactcgggtataaataaaaggcccagggccaagctagtggcacagaacagacattaaggggttcaccatggaatacacagggcagaagagaagacttggcagcagggaaatggagtctgaaggtgaccaatggagagcacagcattctcagtgcttgagatgcagattccagggagcagtcagcagagggccagaacatcttgtggggatccttttggggagagatgacttctcttaggagttttggtggggaagagccactgagctcggtgcacagaaggccacggtttacagggagacactggtcttctgagaaatcaaaaaagaaagtgggaagcaggaagttatatccagaacactagtataaaggaatgaaaagcccccagagaccttcccccatgggatgaggactcaattgcaaagcaataccaggcttgaattgactgacacagagggcctttctctgctgacagctttgggagtgatggtcccacccaggccgcttaagtctggctaagtgtttcaaccagtctgcacaactttaacccagctctttgctgtttgctgctggattgggaaatttcatatttagcagtgaatcacaagtatacagagtctccacacactaattcctagagaagagaactctgaataaaggaggagaacacccctcatattgtcttatgcccaatttctgcctccaaagaaagaagaagtaaaaactaaaaggcagaaatgaaatccacaagcagacagcccagcgccacaccctgggcctggtagttaaagatcgacccctgacctaatcggttactagtggtgcatgcagcccccagtcatgtaccccctccttgctcaatcaatcacgaccatctcacacgcacccccttagagttgtgagcccttaaaagggacaggaattctcattcagggagctcagctcttgagacaggagccttgccgatgctcccagccaaataaaccgcatccctctttaactcggtgtctgaagggttttgtctgtggcttgtcctgttacacaagcaccagatagaattatccctaaatcaagagatgatgagatagacgcttaagaagcataactcagggccaagtgcagtggctcacacctgtaatcccagactttgggaggccaagttgggcagatcatgaggtcgagagatcaagaccattctggccaacatggtgaaaccccgtccgtactaaaaatacaaaaattagccaggtgtggtggcaggcgcctgtaatcccagctactcaggaggctgagacaggagaattgcttgaatttgtggaggttgcagtgagctgagatcacaccactacactccagtctgggcgagagagtgagactttgtctctaagaaaaaaagccccaaattccatatgcctgcccttaaagttattcccaaattacctctaacctttaagatatgtctcactttctccaagataataaaagatgtgggtgaaggaaaagaaaaacccaatcaatcaaataggtgaagaagcagacataaacaggcagaagggaaatggcagcaacataaaataagccagaggcaaagtatcccccaaaccagaggagccttggggcatgcacagctggagagagcaagtcagagagggatcttggcactgcctcaccttccacttgtccagtgtggggagcactaccccattggaacggttaaggtcagacaccaggacattcagaatgtcctgaatctacaggaggtgaaaagggtagaacaagggcagggggagaaagacagaagtggcttagagagaggcaagagagtcagaggaggaggaagaggtagctttagggaaacgaaatgctgaagaagagcaaaggagatcaagaccatggtctggccttcaaaatggctgcctgctgccttgccaggggcagaaacaaatagatggagaagtcccctgagcgatgcagtcacacagggtggagtcacctgaccgatgccactctgaatactctcattggatccctctcctcaggcccaggatgtggggatgaatctggcagagcaccagacctccacttccattttaaaaaccagacttttgagtaagggttcacttgaacaaaggggactcccgcaaaaaaaacaagtttgaacacactgatcttatccaatgtcatcttacagaggaggtaactgaggcccaggggaagaagtgacttttctgtggtcacccagcacgctggcggcaaagatgagattaaaagttagatcttctcctaatcttagtgcctggggctctcctcaccacatcctggggccctttcggtgactccaaaaaagacagcctgatggcaagtggctgttctcattggcctggcttccccttgagactggggatgaggaaaatgaaacagcaactgtcatttcctgggtgccttgggtgtttatggcaggccctgtacttggcattaacctaaaaacaacaataacaaatctcatttaagcttcacaagtgtaagtcaaacaataccacccctattttacagatgtgaaaagagaggcccaaagagatcaagtaatttgccctacatcatatccttagcagctggagaggtaggattaaaacacagaattcttaaccaggacccaacagttcttccacaatctaaacaactaccctctactgcccttgggccccctgtccccaggagcctggccagccaagactcacatccccaggtgagtggcaaccaccagaagtggttgtctcagggttactgccattttaaattttctctttcgctcctctaggaacaccaaggctgttcctccactgatagtttcttatctgtggaaaagaagagcaggaattctcatgagaagtccctgcagtcgcatctgactttacagtttttactgaggcaaaaatttaaaaataataataagtactacgtttatttacttcaagaaaagtaaaagctaaggcccagaatgtggcaaggcaagggttaaaaaaaaaaaagaacaagttttcctctacctagcaagctcacttcaaggacagttataatactgtccaaatagccaaggccagaggaatgggctccagacaccccatcccttccagagcaaggttaaaaaaaatatatatatattttactgttactcttttcccaggcttcttaagcattattatgttttacaaatgtctatatttatccaggtcttgtttttctttcaatgcagctacaaggtcaccaactatacaaggtcacaacttatgctatagattacatgacctatgactgtataattaactgcttttgttttgcttctgtaaggctgcttacaaaaaccccactctgactttgttcaatgttcagctttttaaatataaatccactgagccggtgcgtacctaaaataaacaacaatcctcctgtactccatattggtctctccgttcctcagtttaccacatttttggcagccatgaagggaccggagactgcaggctgactgtctcctttgcctctggggtctggagccctgggccaggggaaacctgtgaccccaggtgccaccagaaaatcttcagcccggaggggaaatcagctttcccctgacctggttccccctacgcagcagcacgacaaaacctgaaaagaactacaggacaatttcagaaacagagcacttcaggaaccacagtaaggttttgggggcccaaggcaggacccgcccatagggacagaaagaaagctaatcgcctcccggggtgtgccaaatagtccgacccagaggggctgggggcaacaggagtggctcaattcagataaaactcacaccccagctgacacaggacacgaaagtagctcactaagtcagctagaaaactgacgagagtggcttaccaccccaactacaaaactagaggtggcaaaagtggctcgccaccccaactgcaaaactagaggtagcaaaagtggcttgccaccccaggtacaaacatgagaactaaaagtatataaaagtgtgtaaatggagggacctaattaggctcatcagtcgcaaaataagaaatcacaaatctcttaacgtaaactgtatgctccaagaaaattgtggggcaaactgagactaataacaatctacatatgactaataggagctgccctacaactccaagttataacaaaaataaaaaactctccaaagccaagcagcgtctgaaaactcctgtaataggagacagcatatagtcggccaaaatgagaagaaaaataactgtacaaaagtaaatgtgcagcatcataactgggagaaaatgggaaaaaactcatcaaaacctagtcccttaaaatatatatttaaaaacttaaaagttttacagaaaattataaagttaagttaaccccccaaaagttaaaaactctctgtaaattaaaataaccctcttttagtattaaatagccaaccaaaggaactgtaaactaaaaaacaattagccatatatttaaggtggtgacaggggtcagaggacagccagggcacccagaccaaattcttttaaattgactcatggttaaatataatataaacaaaaccgacataaatccagccctgtttaatggcttattacaaaaagccaaaaataaaaataaaaacagcttcgccggcagacacagagttaaaggaaaagtcccagaaaaagcaaaagaagctagtttataggagccaccagagggaacaaaaattctccttccatatgtcccagcctacccccctttaccgaggccaacagctccagctctccagaaaccagattcaggagccagcatgctccaagtctcaccccaaagggaaagactggagcctcaagaggctaaggaaggaagtcaaaatagtcaagcaggccgtcccaaatctggttgtgctcgagctatacaaatgcctctcagggagatacgaagacccatctattataatgaccagggccacatcccagtggcgggggggcaacggactttcttctatcagcccttttcaaccactcatctactaaactgaaaacaccacacaccctcctacacggagaagccccaagctcttataaatctgatgcattccatctttctgacacataatctaacctggccaaattgcaggcagcttttcctaacgttgtttaacattaaagagtgccagagaatgacataagcagctctccgctagctagaagcccatgcactagcagaagcagtgaatgctcaagcacatgctcaaggctggttcccagaagcagaccccaatcaggacccagcttcagcgcctgcagaggtacaaagaggtcgcttttacaggggtaaagagctggtaaaaagagaacaattaatataaggaaaatttcaaaagtgcttcagagagctaacgagagcccaagttagttttataaaagactctgtaaaacattctggctttacaccccatttgaccctaaggctgccaaaaatcagcacgtggtgaacacagcatttgtcaggcaagcccagggtaacatcaagcagaagctgcagacatgaatgccacccaacttataaaagtggccaccaaggtatatgttaactgtaaccaaggaacaaaatgggaaagagcaaaagtaacaagctaggcacgccaagggttaagtccctctccccagcccagctctatctagaaaaagagggggcgggaaccagcgccaggagaagagcaaagaaaagaaaaaaataaaagtgtaaaaaaggaaaggaaaaagaaaaaaaaaattggaaaaaaatagaaaaaatagaaggcagtgcataggggcagcgcccgtgccgttgtccggccccaccagccagccgcaggagcaggagaactcaaaaagaaaaagaaaaatgtaaattaaaggcttaagaaaaaggccaatctgttggcaacagctcttataaaaagagaaattaacaatgtgagaggacgtggacgcgggcatagacatgaaagaggtcaagttaagcaaggattcgagagccagacaaggttaaaaaaaagatcaatgcgtgagatgcaaaaaaaaggacactaaaaaaaataaatgtccagaaggtaataaagagagtagtaaaggctgtggtataaaaaagtcaccagctaaaagctgtcacaccctaaaaaaaaaaaaaaaaaatactgatctaatccgggctggcaggggctaaaaaatataaagactagagacagactgagcaccttctcattaggcttccagaagcccacagtcacattacaagttaaaggcagcaggattctgccatatctggattccaatttctcactaatggctaagtcactatatgaagttacaaagtggggggaacccctcctctgggaaactaaacaggagaaagagccatgctttatgaaaacttgcttataaacttcataaaattgccccatgccagaggctatcggtacatgctagtgcttatttacaccttttcagggtgggttgaggctttccccaccaggacaaaaaaagcacaagaagtgactgaagtactgctaaaagactttatccccaagtttgaactccctctaactttaaagtcagacaatggccagcatttatagctaaaatagtgcaaaatttaacaaaactgttaaaaataaaatagaagttacacacagcctatcggccacaaagttcaggaaaagtggaacgcatgaaccagacactcaagcagctactaaaaaattattgccaggaaattaatctataataaaatcaggttttacctatgaacctcctctgagtcaggtacacccccaccgaacaaactgggtatttgccctataaaattttgttcggtcggccacccccaaatcacaaatcaaattaaaggtaatctccaagaactaggggaattaaccttcaaaaaaaaaatgcaggctttaaaaatagccatgcaagaagtccatgactgggtatgggaaaaaatgcctataagtctaacagacccagcacacccctttaaacctagtaactctgtttcagttaaaaagtaaaacccaacttctctaagacccatgtgggatgggccccatacagtaatcttgtccactgccactgctgttaaagttacaggaatcatgccttgaatccatcacaggcagctaaaaccggcagctcaggacaagtaaaccaaccagcaggacccagaacattcaacccggctaatcttgagacgagaccaagctgctgctgaggacaacaaccctgccctggtcactccggaggctgaccagtctacacacggctgaagcttgaggaaacaagccctgttctaatcacacattggaagctgactagtctacgcacggccaaagcttgaggactcgtcaagcaagtaaatgtaattaaaaatcttaaaactaatagtttttctgtaatactattttcctatttgttctgtcactgtgctcaacctcctcccccaagtaaagacctcctttgtccttactaaatataagtatgctgtacattgttttgctgttgttaccccccccttaaccatactaaaaaaaacacctatagaagggtgtccccactgtacacatactacttggtcagggaacagtacaactaaaaccctgttacactatatgtattataaatgtacagagactcgcttagaaacttgtacttacaatcagaccacctattcaattaataaccctggaaatggccagccttatatatgctataaccctaagtctttacctgggacttggtttaaaattcataccaagtcaaaggaaggaagtcttataagtggcgggggggctatatccatatactttaatatttgtcagttcacatccatgaacccaacctatttcacagtctctggtcctacagggtactatacaaactgccagtacaaaattatatatacaccccctgtttgtccctccaaggccctagcaatagtttgctggaactgcacaacgcagttcactgacggatcatcaccgaggccaaagcgaatcttgctcatcaaaataccagcaaaaccaaattgtaagacaaacacttacagtcctataaatcttactatcttaaagccagatatacctatatggactacaggttactccatgacattacgaagctacagtcaaaaagctaaaatagctttatacattataaagaggactcaaaccaagcagtcagcccagcagcaattccgagtctttacgtcattctttgaacatataaaccagaagttaccagagcctcctcctttaaccaaaaacctatttgctcagctggctgaaaacattgccagcagcctaggcatttcctcatgttatgtttgtaaagggactaacatgggaaaccaatggccttgggaagcaagagttaatgcctcaagataactttaactgactctttccccagactgatgcccacaagttcaagcgtctggctcttaaaaacttctattattaaaagatactgtattgctcattggggaaaagtttttacagacccagtaggagaactaacctgcttaaaacagcaatattataataaaacattaaacaaaactttgtagcagggcagagataactacaaaacaccccatccagacccattctcccgcttctcttctctaaaccacacttaatatccaaatacttagcaagtatttggaagtatttgcaagtatttggaagctccaaatacttggcaagcatcccctggtctttattagatctgtgggccatgggcatatcaacagttgctagctaaatgaacaggggcctgtgtgcttggaacaattagactgtctttcttcctactcccactgcaacagagagaaactttagggtatcttatctataataaagttgaaaaaatacagatataagaagaaatataaaaattaaaaattaaaaaggcacaaattggcaccctaaaaaaaaaattcaatactataggccagctacctggacacaaaataagtcataggcataccgcagtcctatttacatgcttaaccacatcataaggttgcaggcagtacttaaaatcatcactaataagacagcaaatgcattaagtttactaacccagcaaaccacaaaaataaaaaacgccatcagaacagattaactttagtctgccccctagcccacgaaggaggagtatgtaaaaaattcaatctaactaattgttgcctgaaaatcaaaaataataaaaaagcaattataaaaataactacaaaaataaaaaaattagcccacgttccagttcaaacttggaaagagtagtctccagattctctctttggaggctagttttcattttttggagggttcaaaactttaataggagtggttttagccacactaaaaagtttcctaatactcccttgtctgttacctctcattgttagaagtattcaatcaactatagaggcaatagtagctagaaaaatcaacactcagctaatagctctgcgtaaatatcaacctttgtgttaaaaaaaaacaaaacttgtctcttcaggcaaaactaagtaatagtaatgctttctattaaacttctttcataaaaatcatcaaacgggggaaactgaggcaaaaatttaaaaataataataagtactacatgtattcactccaagaaaagtaaaagctaaggcccagaatgtggcaaggcaggggtttaaaaaaaacaaagaaaagaacaagttttcctccacctagcaagctcatttcaaggacagttataaaataacgctgtccaaatagccaaggccaaaggaatgggctccaaacaccccatcccttccagagcaaggttaaaaaaacaaaaacaaacaaacaaacaaaaaaacacacacacaaaaaaccagattctttactgttactcttttcccatgcgtcctcacggcagaaggcagcctttctgttacatctaggaattgaacagaaagaggacagcccaagcctcatttcagagaggtctggtatactcttagaaatctatgagacggtcatccctaaatccattaatgttttttctctctgaagagaatcaagggaaactgatgcttcagaaagatgccccatattaccctgtgacactcaaagtcccccagattgagacatgaggaagattcaagctgtcaagttcagtttcccaagatctctttcatggtaaataagcaaatctcactccaggcagggtctgggctgttaaggggaggggctgactgacaagactttgatggggggagcccagtggcacttgggggcccagcccagtaagcctcgggagtggcatgagctctggccgcagtcctgccatcagagggattctggggctgggtgggggaggccatcacctggcgatagtacctttttctttgcagccgccaatttgctctgtagggtttcttcagacattgcagggcaggaaggaatgtggggttggggccacgtcagctagattgcggcttaccactggggaacaattcctgtcggccaccgcgcaactgtgcgactgaccagaggaggcgtaaccagggcctactacagcgcagaatagggggcgtggccgccatcctccaagtccattggtcgatgagaaagatgacagagaaaggaggcgaggccaggcagcagcgcgtccaggtgggtgtgaggcgtcacaaggaaagctgagcaggcaattgctgccccgcccactctgggaagaggggcggggccgcccgctccagagggacggaagcggcggggccgccggatccagggacaatggggtggggcgggctttccctgggtgggcgcagcggcttcctgggtccccctcacgctctgggtcagagttcctttacaggcggacctgagaggcaactcaccgactcctgccctggaccctcctgcgccactgaaccccctgacctgggagcctcggaacctagggctcaggaggtgggtgaggaacggactccacagtttctttcctgactcctcacagccctgccccagaccttcccttcccagaaatcacctccaaggacccctaatcaatgttccagacgcctacctctcggaacgccccattcctagagggtccctaccctgattccgggagcacatttgcccccctttccagctggatccagtcccgggctctcctgcttcccagctcctcctcccgcacccaacagcacccctttcctctcagagcggccgtgggtcccatcaggctttcccctcggatcctctgcagatgaaccaggacttatccgaaggtaccaagtgaacttctaggaaaagtccaattctcagatgctggatgtcttccaaaaatgaagcaaattagtaacttagtagctgagtcaactaatcctgttagatggtcaacactggtttttttattttaatatttttaagtggcaactctagtgtgtgagaaaattaatgtgacagctgaatttgtagaaagctgctttgactctcttgggccccttcataagccctggaactaaataaaagtctagtgaatacaggtaagctcccttctttttctccatatttacccctcacttcaactataatttcacaggtccctttttccacattcaaggtggttgataataaagtgggaatgtacaggattctctttaatcctgaattagcaatccaaaaattagaatttgttgcattcttagaactacggtcagggttcctgagcaggtactcaagcagacacaaagacaaaacttccattttatttcagaagaacctccataatcccatgcattaattcccatcataaatcatctcatctcatccatctatctttcatctatctatcatctatctgtcatctgttatctatcatataacgataattcatctatcatctatcattcatctgtctataatccatctatttatcatctatgtatcatatatcgatcattcatctatcatctatcatgtattgatcattcatctatctgtcatctatcattcatctatcatctatcattcatctatcacctatcatctatcatatatcgataattcatctatcatctatcatattcatctatcatctattattcatctgtcgatcatctatcattcatctatttatcatctatcatatattgataatctatcatctatcgtgtatcaatcatctattatctatcatctatctgtcatctatcatatattgatcatctatctatcacctatctatctatatatcatctatctatttattatctctctctctctctcctctattagtactgtttctttggagaacccctagtacatatactctttttcctggctctttgagtataaggtgatttgctagggttaagaatgtagcctcctggtaggctgcagcgagttgagatcgcaccactgcactccagcatgggtgaaagagcgagacttcatcaaaaaaacaacaaaaaaagaatgtagcctcctgtaaccactagctcattccttatttaaatggatcccccccaccctcccagagcgccacactttttgtccattgatcatttgtcttgatatacttgacaaatgtcattgtcatgcatgaaacacctccgtagccaatagtatgtgtattaaaaataacgcttcttcctcttccactcaaaagagaattctaatataatggttatatataaggaaaattttaaatctgagtttactttttaaattatattaaaacattcacaaagtgcaacactttattttttataacagattatttgcaagttacccttaccacaaaataggacagtccattgtgtcctatctaatgcaaagattaaaataaaagaaatatacttcagcaaaaagaactatagtcaatgaatgctgtttgtcaggaagatataagttcatataaggaagtttgtttctgattattttactctagggtgtaaaaactcctcaacaaaaatcagtttgtactggaatacagtctgtcatgtttaagtcatagcagctgagccaggactatattcttcactacatcaagtaggatgaaggagctccagaaatacttttgaagcaggaatttaaagtgcggataggatggctaccatttaagtgatatttaagtttctcccttatgaggcttgcaaggccctttggaatctgacttctacatccttcctttccaacatcatatctcatcatttccccttttccctcctctaacaacctccattcatccacatcatgcacttcagctattctgaacttccctcctgaaaccagccactcacagagcaacacttttcaaatcctggctctacctgtgtaacctgaggcaggtttccaaattctgtgtgtcccagtttcctcatcctcattcctaaatttggaacaataacactcaagtcatagggtcactgtaaagatcaaatgagattacaactactcatgtgaaattcttagcatagtacctttcatttaggatatgcccccaaaatactggttgttgttaacagtgttgatgtgtctgctcataacactcattcccctcctcacctccttttgtatacttagttcctacacatctttcaaacatcagcttaaataggaaaccttccccaaataactcctccctacctaggtgaatattcctcctgtttgtatgaccgtaatccctgcacatcccatatcaaaggacttaatgtcactttctgccatctcttgtatgttgttcatattttttcattatactgaaagctccttgaagacaagtgctacatgtattgggatctgcatttcatctctatcccctgtcataacacttgctacatattatgccttctatgtttgttgaaaaaaaatgaatgaatgaaactcagctggcaagggaaagttactttggctttcatttagatttggggttttttgttttattttcaacatagtcatgagctcttctgctaaaagataaaatctagacatattcaattttacagagtttaattaagcaaagaacaattcactaatggtgcagtccctgaaacagaatagattcagagagagtccaggactagatggtcaaagatttatggacagaaaaaaggaaaatatgcagaaaacagaagtgaagtacagaaacagtaggattggttccagcttggcgtttgccttacttaaacatgggttttcaaagttggctgccttggattggctgaaactcagtgattggtacaagagtaggtgacagcctgtttacatgtctaattaacttacatttcaccatgtacaaagaaacctttaggctgaacttaaaattgtaaaattgtttagctgtgggctaaacttaatgtcacatttctagatcgtgttcaattagctaaccataggcgtcacttctcttctaccctccaaaaccactaatgctgctgcaaaagagaacttccagcagctgtttacctggaaacaagttgaaaatgtatttgaaatggaagccactagaattgtaaacacttctgtcatctttctcctttgtgtgcctctgcagataaggctgctccagtgcccccaaatttggaccttatgctctgtagtttcctgttataaccaatttgctatttgtgttaccaaagtatatttagtagattttatttgaaaaaagaaataaagttagaaaatattgacagtattacataacataagttctttgtttaaatttgtcatatttaatttttgaaagctaaataactaaaatctcatttctactaaattattctttttttcatgctaaggctaaatgtgagagctaacattttacaaaattttgtgtttttctttcaaaatacatgacaaagcacaaaagcatttttatcaggattaaagtaatttatggaaaatctaactctacgactatgtaagtgatgatctagttatattacaatattatgttgttttaatatccattattattgtgtgttaagtgctttccttgtctctatcgtaaagttacatacatagtaagcaattataggtataatgcttacaactgtaatgatgaataataaataatgacatttgttaaaccccagatattcatttatttattcaggcaatatttattatgtatcagatactgtgctaagcaatgagtatatcatgatgaacaaagaaatgggactggactcttggaacaagatgaaaacattacaggaataagcctaaaacacatttatatagttataattataaatcacaataaaacctacaaagaaaaaaaagacactaaaagagatcatagcagagggaatctaatttagattggaatgccaggaaagtctttccaaggatatggtattgtaaattaagctaaaaagcatgaaaaccaattctacacaaactattccagaaaatacaagaggagggaacactgcatgaaaatcattcagtaaggccagcactctactgacacccaaaccagacaaagatactacaagaaagaaagcaaggaaaggaaactcccaataatattcctcataaaataggagacatagtattgaaattgatgtgaaaatcctcaagaaaatatgagcaagttgaattcaggtataaaaagaagataacatgctatgattaaatatatcaggaaatgtaaatctggttgaacattttaaaatcaatagatgtaatttatcgtattaacaggtgaaagcagaaaaccatataatcatcccacaggatgtagaaaaaatatttgacaaaatttaatatccactcatgataaaatctctcagcatagagggatagtggagaacttcctcaacttgatagtgagcatctctgaaatacttctagctaacttctcagttagtaaggaaagactggatgctttctctctgaatgcgagaacaaagcaaggatgtcctctctcacaacttatattcaagattttgcttgaggtccttgtcagtgcaataaaaggaaaaaaaaaatacaataaaggcatccagattggaataaatgaaataaaaacaaaattgtttttatttttagttagcatgattgcttgtggagaaaaatctcaaagaacttaacaaaaacttagtagaactaataagcaatactatctagagtgaaagaaacaaggtcaagtttattttgtaccctgtatttctgtatttctgttttatttctgtatggcagcaatgaacagttggaaattaaaattttaaaacagcatcaaaaacataaaatgcttagctataaatctaacaaaacatatacagattctgtgccaaaaactgtaaatgtctatttaaaaaatcaaagaagagctgaacagagagctacatcatgtctattgttggaaaattcaatagaattaagatacaaatttcctcaaagtgatctggatgcaacacaattccattcaaatccaagcagacatttccttttaaaatccacaagctgtttctaaattcacacgaaaattcataagaataaaaaagccaaaatacttctgaaagagaacaaatttagaagactcctactatctgacttcaggatttattataacacagtgtaattctggtgaaaagacagacatgtagattaatgaaatagaatagatactagaaatacagtaactatacacaggcaatttttcacaaaaatgcaaaatgcaattcaatagagaaagtataggtttttaacaaatggtgctggaacaattggacatctgtatataaaaaaaagagttttaattcataccttgtatcatataccaaaactaaaatagatcgtattcataaatataaaactataaaacacatagaggagaacctacaataaaaatctttgtgaccttaacttagacaaaaatttcttggacatgacaccaaaaatatgatccataaaattatgataaattagacattatcataatttaaaagtttttgtccaaaagatactgttagaataaaaacacaaaccagaaacttggagaaaacatttgcaaaacacaaatctaataaagggcttgtatccaggttatgtaaagacctcttgagctcaataataaggaaacaaataatttcataaaaatacataggcaacagatttgagtatagagttcaacaaagaagatataaggatggcaaaaaagctcataataagatgttgaacatcaggtgtcattggagaaattaaagccacaatgatataccattatattctattaaaagagcctaaatttaaaaaaaaatttttttaaatgacagcaccggccaggcgcagtggctcacacctgtaatcccagcactttgggagtccaaggcaggtggatcacctgaggtcaggagttcgagaccagcctagccaacatggtgaaaccctgtctctactaaaaatataaaaattagccaggtggggtggaagacatctgtaatcccagctactcaggaggctgaggcagaagaatctcttgaacctgggaggcggaggttgcagtgagtggagattacaccactgcactccagcctgggcaacaaagtgagactccatctcaaaaaaaaaaaaaaaaaaaaatgatgacagcaccaagttctgaccaggatatagtgcacctggaacactcatacattgctggtggaatacaaaatggaacagccattttgaaaaacattttagcagtttcttatacaattgtttattattagtagtagtagtattgggatagggtcttgctctgtcacacaggctggagtacagcggtgcgatcacagttgaatccagcctttacctcccgggctcaagcttcctcatgcctcagcctctggagtagctgagactacaggcacatgccaccacacccagctaagtttcttaaaaattaaacacactttagcataagacacagcaattttactgctaggtatttatcccggagaaatgaacatattatgtccgtatacaaacctataagcaaatatatacataatgagtttattcataatatcaaaaactggaaacaactcaaatgcctttcaactggtaaatagataaacaaattgtggtggatctgtgcaatgaaattatactcagaaataaaaagaactaccaatacccacaacaatctggatgaatctgaaatgtataacacttagtgaaagaaaccagattcaaaaatttatatacttgtttaatcacatttacgtgtcactctggaagagatcattgtttggcaagggctgggaatggagtgaggagttaattagaaatacacgcaaagtggcccggtgcgatggcttacgcctgtaatccagcactttgggaggtcgaggccggcagatcacttgaggttaggtgttcaagacagcctggctaacatggggaaagccagtctctactaaaagtacaaataattagccgggtgtgatggcgcacgcctgtagtcccagatactcgggaggctgaggcaggagaatcgcttgaacccgggaggcggaggttgcagtgagccgagatcacgccactgcactccagcctgggcaacagagcgagactctggctcaaaaaaaattaaaataaaaaaataaaaaaattagccaggtgcaatggtgcacacctgtggtcccaactacttggaaggctgaggtgagaagatcacatgagcccaggatgtcgacgctgcagtgagctctgattgttccactgcactctagcctgggctatagagcaagaccctgtcttaaagaaaaagagagagaaagaaagaaagaaaaaagatagaagaaaaagagggaaggaagggagggaaggagggaggggagggggaagaggagaggaggaggagaggggagagggagcagaggggaggggcggaaggaagggaaggaaatgaggcttggaaccagagccatggaactctgttcttgatggcggcatctccctcatcaagtcggggcgtccatctccctgctggctaaggaggctcccaccccagtggagggcaggactcacctctggcttcagtgtcaggaacatggttggctgcgagtagacggtgggaagatggatagatatttgctggcccaatgaaggagtgggggttgtgactaaacacgatgcctgatcctcttctggggctccagctggcacccggagctgaagagaaaggctttatgatgaaacttcccttctgccaaaaataaccagtgcaagctgggcatggtggcacaagtctatagtcccaactactcaggaggctgaggcaggaggactgtttaagcctgggagcttgaagccagtctaggcaacatagcaagactctgtctcttttcaattaaaaactattgcagcttcctcaatcttccccggcagcctggggtggggcgctctgcttttcagagctgcctccagaacttcatccttcctccttccctcctccaccctcctcttcttgtttccatcacagccccgccaccctcaagccacaccccattgatcatttgctaaagattttagtacctggctctggcctgctttccaccgtcaacactcacatcaaggcacctggatctcttctccgccggcaatcctgccttccgccttcaggtatggatgctgtcaggagagatctccatctgctcccaaggccaagtttcccaacaccctgcagcaaggtctgccctccctcctagcattgtagatgggcctgccagggccaggactaggatgaaacaggccagcaaggcacccagggcataaaggttaaagaggcactcatccccagggtcataccagtagagagtcggcacctgagaatgagtgcctcctcaattttacacttgcttgccttgctgtagtcccagctctgggacctaccttatgaacacaaggctctggtcccctcccacttcctcagggctgtctcttttgtggcatccctcccatcagctgcaaacagatcctgtgtaaataccaccatacaaagccggccttgacccactttgccctccagctattgctccattcttctgttcttttttctttctttctttcctttttttttttttttagggtttttttttttttttttagtttttgaccaggtcttgctctgtcacccgggcttcagtgcagtggcatgatcttggctcactgccgccttgacctcctgggtccaagtgatcctcccacctcagcctcccaagtagctgggactacaggtgtgtgccatcatgactggctaattttttattttttgtattttttttttttgtagagacggggtctccccattttgcccaggatggtccgaactcctgggctcaagcaatcctcctgcctccacctcccaaagtgctaggattataggtgtgaaccaccatgactggcccttctttttttttttttttttttttttttgagacggagtctcgctctgtcgcccaggctggagtgcagtggcgggatctcggctcactgcaagctccgcctcccgggttcacgccattctcctgcctcagcctcccgagtagctgggactacaggcgcccgccactacgcccggctaattttttgtatttttagtagagacggggtttcaccgttttagccgggatggtctcgatctcctgacctcgtgatccgcccgcctcggcctcccaaagtgctgggattacaggcgtgagccaccgcgcccggccatgactggcccttctgttcttatttctagcaaagctaaagtcatccacctttgacgtctctactttctctccttccagtctccccaagaagttgctcttgacctccacccaacagcacagcctgttgttgattcagtgtctcccatccaacatggctgtggccccagccatcctcccagcctcctgccttggtagatgctatctctgcccttagttctcatgccctaattaatagccgggctgtgggtgctaagaggtacccagctcctcctagctcagaatccagtgacaaatcttctttatgttaacagggcaactccttccaaatccctgggctgctgtgtatgactgctggggtgaacgtcgccatgtactctaccccttactgtgctatcgttcagaggtcttgtcattgatgatgattaaggaaatcataaaaatgttaaacgaaggccaggcattgtggctcacgcctgtaatcccagcactttgggaggctgaggcagaaggatcacttgagcccagagctcaagaccagcctgggtaacatagtaagaacctgtctctacagatttttttttttttttttttcagctgggctggtggtgcatgcctgtagttccagctactcaggagtctgaggtgggaggattacctgagcccaggaagtcaaggctgcagtgagccatgatcctgccactgcactccagcctgggtaataaaaaccagcctgtttcaaaaacccaaacaaataacaaacaaaaaaaatgcaaaatgaagaaagagtcgtctcaggagcacgttcctctgtgtgtgtgaggaaatgttacatatatagtatatgtagagcgacagagactcacagagagagagaacgagtctaaagcagaagctaaaagcccaaggaaccaaatgcaatgagatgccactaaatacccattaaaaataaatcagtcagtcatgatggctcacacctgtaatcctagcaatttgggaggctcaggcaagaggatcacttgagcccaggagttcaagactagcctgggcaacataatgagatcccatctctacaaaattttttaaagtgcctgcagtcctagctactcaggaggctgacgtggaaggattcctttgagcccagaagtttaaggttacagcgggctctgatcgtgccactgcactctagccttggtgacagagccagatcccaattctagaaaaaaacgaaaactgaaaaagtcagatttaaggcccacaagagcaaatgttggtgaggataggaagcatctggaaccttcataggtggctgatggggatgcaaaaatcatacagtcattttggaaaatagttagacttttttttaaaaaattctacttatttattggctagtgtagatctttatttatttgtttgttttgagacagagtctgctctgtagcccaggctggagtgcagtggcgccatcttggctcactccaacctccgcctcccaggttgaagcgattcttgtgcctcagcctcccaagaagctgagattacaggcatgtgctaccacgcccagctaatttttgtatttttagtagagacagggttttgccatgttggccaggctggtctcaaactcctcgtctcaagctgtctgcctacctcggcctctcaaagtgctgggactacaggcgtgagccaccctacctggcctagtgtagatctttaaatacgaggtattttctttaaaagttaaacacacactcgccacatcacccagcaatggtgccatgtggtgaatatccattcaggtatctaggtatctgcgccaaagaaacgaaagactgtctgaaaatgttcaaggcagctttataaaaatacccaaagaatggaaatcactcaaatgtgcatcaactgatggatggaaaaaatgggagtatattggccaggcacagtggcttacatctataatcccagaattctgggaggctgaggcaggaggattgtttaagcccaggagttcaagaccagcctcagcaacatagcaagaccctgtctctaaagaaaaggaaagatggtctggaataccactcagtgataaaagaaaagaactactgggctgagcgcggtggctcatgcctgtaatcccagcaatttgggaggccggggggtgcggatcacctgaggtcaggagttcgaaaccagcctggccaacatggcgaaactccatctctactaaaaatacaaaaattagccagtgcgctggtgggtgcctggaatcccagctactctggaggctaaggcaggagaactgcttgaacccgggaggtggaggtggaggttgcagtgagctgagatcacgccattgcactccagcctgagtgacagagtaagactacacctcaaaaaaaaaaaaaaaaaaaaagaaaaaaagaactgaactactggttgaatctcaataacacgattgacagagccaatcacaaattattttatttatataattactattattatattaatttataatttatattatttcatttatattctagaaaagggaaactatagcaacgaaaagcaatttggtggttgcctagaagtgtgggtcaggacaatgactcactgcaaaagggtgtgcgggaatttttggagtgatagaaacattctaaaacttctcgtgatggtgtttgcatgtcttatacatttactcaaagtgatcaaactgtacacttaaaatgggtgagtttaggctgagcatggtggctcacgcctgcctgtaatcccaccagtttgggaggtcaagatgggaggatcgattgattccaaaagttggagaccagctgggcaacatagtgagtcttcgtccctacaaaagaaaaattttttaaagttagccagccatggtggtgtgcgcctgtggtcccagctagttgggaggctgaagtgagggatgacttgagtccaggaggtggaggctgaagtgagctgtgatcgtgccactgcattccagcctgggtgacagaataagacttcgtctcaaaaaaaaaagggggggtagggggtaagtttaattgtaagttattttaccataaagctgttaaaaaataactattaagtctaaacagtaatcctggaaacccactttgggaacagagacatgcatgcagcctgtgctcaaaaaatgctttcagactgtcggggaaacattatgcaccagtcagtgtccactaaaaggaaagcctcttccctccctcaagttcgagtcagcccaggcttaatgttatccttgtctgccacctggtggtcaaaatgggccatgtcggtgtcctggtctttcaccccaaactccatgaggctctgtggttgggctgaaaagccgtggatggaaagaaggggaactttacccctggaaaactggttccctgagaggcaagttggtcagaggtacgggcataaggggattactaggggtctatgggacaggaatacagcctcttaatgacagagaaaatactttggtgcaaccaagaggccgattgaacacaactcacccacctttgcacactgagataaaatatgggaaggttttttgcaaagaggggaaggagaaaagtttagggacaacaatgagctaagtaggaaaggtagtcatgtggacaccgatggtgagttcggggatgctcagaagattgacaggttagcaggggattctgaaaggcatggatgggacacttcaagatatgttgtttcaattgataaagatgcataaacctaacattgtgcttattggctacttaaatattggtgacatactgcttcctcaataataaggattatagcaaacttaattatagtttcctaaaaccttttatctggtggaaatttctattaattatcaagaggccttaaaataaacttcaatacacataaacccttgtattcattttaaatctatccaacctacaaaaacagaagagcatattggccacaattcaaggccatgttacattggaaaaacattctctatcatgtggcctggcacaagggttggcagcaacagagcagacagaaccaaaggaagaagggcctgaaaaacccgctagtgcatttgggctggcattttgttacaggaggttctgatccaattttaaattctgtattgcagtctagtgaggcagcgagagttcattatcccaaccgcaacctacagtctaccaggagacatgcgacccaccagctggtatttgaaacaatatagtttagtgcctaactgctcaaagtgtggtccctggctggggagcatcagcatctcctgggagcttgttagaaatgcagaatttcaagcctttcgtggatgttatttgttagctagcctacaaaacatatgataataattcataaacatgcactaaagtgaaaaataaacactcacctacacacaggcacacacacaaacatagggcttgctaatactaactgcaaaatgttttatccaataaatgatgataaccaatttgttttcaaaatgagaatgtaggatttgggtacccatttctgtgtaactaaaaataacaaaattcgatggcttaaaataattatttaacatgaatcatttctacaggttaaaaatatggaaaggccttggctcagtgattctgcacgcagtcaaatagtatctgggactggaatcacctgcagtctcactcattgacatggccgaagtggcacctgcagcctctctctctatccttatgtgatttttccatatgggctttccagcatggagtcctcagggtagccagactttttatatggcagggaaggtggtcttctcattctatcagaaatgaaagtgatatttttggcctctctcatttctcttctatttttcaacttgtttaggacctgggcaggaaatacagctgctatttgctagactagtgccttatagtctcaacactttacaatgacttttctttcattcccatggtatcttcccacttggggccctgcgttgcttggtgccctagtacacccatactcttatctccccagcccctttggggcgtcagtctgcagacttactccacctgccccccactccactagaggacccaacagcaaccctgtggcttctgtcacgcccttggctatctgctcatctcctgctaacactccaaatcctgagtattaggcagcactaggagattgcttcattgcctaggactccaaaaggggaagtcctggattgatgtggagcagcctataaagtttcccaggggatgtgaggtgagagaatcaacaaggagtggttgagacataagtataatgaggagagaagagcatgcccctcctcatccccacccacctgtagttccaaaagaaggaaaccttttttctttatctcttgaaagaagacaaagttgtccaatttaatgacatcacgtatataacagtgaaatgtcacaatattctttgtgctgcaacagtatcaataactagtgaagccatatgaccaaccaccatcacaggaagccatcagtgcctttcaaacaatgttttcatgctatgcttgaggccaaagagcaggaacctcggggagaggtagagggagtgaaatgtatccaaacctgtgaagatactacagccaacctcagcctaaaaacacacaggtgatactctgcctgccagataccaggtttctcagagctgggagagtaggtgagggctgtgagacccttaactctgactcaggagcagaggaatacatctctggttttcacagcatcagtgacaatttcctgagcagtggtgggcctggctgcagaaaacgggagccgcacacctcacgcacacacaacagtgcacaacagtctgcctggggcagaagaatgcagcgacctgtgctcccaaccacacaaatccctgaaggtactgctggtgcccagctgtcattcaaggcaatagacacactagcagggacagaggcagcaaaacgagtttcctaggtgatggcagggcaggcagcctgaggcatatctcagccagctaggcacagaaggaaaaagctgaatgactctaaagagaaatcaccccttttgtactaaagggagagaattagaagggttacagctcagaatgaatcccatttacaatcgcatcaaaaagaataaaatacttatgaatatatttaaccaagtaagtaaaagaactgtacagtgaaaactataaaatattaattttaaaagatttaagaagacaaatggaaagatacactgtgtttatgacaaaatcatgacctttacagcaacatggatgcagttgggagccattatcctacatgagttaacacagaaacagaaaaccaaatatcccacattctcacttataagtgggagctaaacattgagtacacatggacataaacatgaaaacaatagacaatggagactccaaaaggcttaagcgagtgggatcaagggttgaaaaactacctgctgggtactatgttcactatttgagtgatgggataccaagcccaaacctcaacattatacaatatattcatgtaacaaacctgcacatgtgccccctgaatctaaacaagcaaacaaaaacaaaaccaataaatggtttatgttaaagagtaaaagaaattctgaggtacaaaaaaagaaaggatatactgagttcatggattggaagaattaatattgttaaatactaaccaaagtgatctacagagtcaatgcaatccctatcaaagttctaattgcatttttcacagaaatgtaaaaaaatcctaaaattcatatggaaccacaaagaccctgaatagctaaaacaatattgaaaaggaagaacaaagctggaggcatcacacttcctgatttcaaattataattcaaagctatagtaatcaaaacagtgtggcactagcataaatgtagacatatagaccaatagaacaaaatagagagcctggaaataatcccacctatagtaacaaatttttggcaaaggcaccaaaaatacccaataaggaaaggatagtcttttcaataaaaggtgggacaactggatatccatattcaaagaaatgatattggacctttatgttacgccatacacaaaaaccaattcaaaatggattaaagacaagtgtaagacctgaaaccattaaactccttgaagaaaacatgggaaaaactccatgacattggtcttggcaatgacttgttggttatcataccaaaatcacaggcaacaaaagcaaaaataaacaaatggaactgcatcaaactaaaaagtttctacacagcaaagaaaacaatcaacaaaatgaaaagacatatggaatgcaagaaatatgtgcgcatcctctatctgataagtagttaatatctaaactatcttaggaatacagctctatggcaatagaacaacccaattcaaaaatgagcaaaggacctgagtagacatattcccaaagaagacatacaaatggcaaacaggtatatgaaacgatgatcaatatcactaatcatcagagaaatgaaagtcaaaaccacaatgagatattacctcacacatgttaggttggctattaccaaaaagtcaaaagataagtgttgggaaggaaatggagaaaggggagcccttccacaccatcagtggcaatgtaaattggtgtagccattacagaaaacagcgtgaagaaaacagtagttttctcagaaaactaaaaatagaaataccgtaggatccagcaattccactattgggtatatacccaaaggaaattaaatcagtacgttgaagaaatgtctgcactcccatgctcattgtagcattatacacaataaccaagatatggaatcaacctaagtgtctggtgacagatgaataggatggtatgtatgtatacaatggaatattattccaccttaaaaagaaggagatcctgccagctgagacaacatggatgaacctgaaggacattatgctaagtgaaatagccagatgcagaaagacatgtactgcatgaactcacttacgtgtggtaaaaacagatattagaatgatggttattagggactaggggtgtgggaaatgagaagatgttagcctaagggcataaattttcagttataagataaataagttctagagacctaatgtacagcacgtttaatagtaatgcatacttgaaatttgctaagatagtagatcttaagtattatcaacacaaaaaggaaggcaaagttagaatggcggtcattaaaaagtcagaaaacaacagatgctggagaggatgtggagaaataggaacacttttacactgttggtgggagtgtaaattagttcaaccattgtggaagacagtgtggtgattcctcaaggatctagaactagaaataccatttgacccagcaatcccattactgggtatatacccaaaagattataaatcattcaactgtaaagacacatgcacacatatgtttattgtggcactattcacaatagcaaagacttggaaccaacccaaatgtccagcaataatagactggataaagaaaatgtggcacatatacaccatggaatactatgcagccattaaaaaggataagttaatgtcctttgcagagacatggatgaagctggaaaccatcattcttagcaaactatcacaagaacagaaaaccaaacaccgcatgttcttactcgtaaatgggagtttaacagtgaaaacacacggacacagggaggggaacatcacacaccagggcctgtcagggggtggggagctgggggtgggataccattaggaggaatacctaatggaggtgacaggttgatggggttgatgggtacagcaaaccaccatggcacgtgtatacctatgtaacaaaactgcacgttctgcacgtgtaccccagaacttaaagtataataaaaaagggggggacaaatatatgaggtaatagatatatgaattagcttgattgtgatgattatttcatgatgcatatgtgtatcaaaccatcacactgtataccataaacatatacaatttttgtttgtcaatttttcttcaatagcacctagggaaaaattaaactttgatgctattgatttttttccatctgtacccatcggtggtcttcttggagagaaagaagaaaacttgggaacattgccattttctaacttctgacataaaatgctttcttcttctccaagtattttggtggattgagttgccttagtctgggttctgccagaaggcaactctgagacaagatttatgtgccaatagtttacttgggaggtgctacaggaaaacgctggtagggtacagagaaaagaggcaaggaagggaaggaagccgagggcatgatcatgccagtttccaccataggcaattggagcaccaggaattggtacagaacactcacctcacagttatcactcaaaaggtgaggtaggtgggcatttttccaccaatccacatcagtgactggttgagaaaaataatttccctttcctggaagcagtaatttccctttactttcagcctcccgagcaatcaaagagaattcagacaaaaaaaaaaccaaaaaacgaaaggtgttaacagtttgccgacgacctgggtgcatagaaatgtaacttgtttactacaaaagtcaatttctgtcttttcaggtgactcagtcttttaacaatgcaaaggctcttcccctaattcctgcagttctaaattactgagtgccccattctagaatagtgtgagactcaacttgatctttcaggcaagcttacctgcactgttgcttaggcctggccagtccctctacagtcctttcctacccctattggactccctgggggaaatattaatcaatgaaacaagataggtccactagggaaagaaactattgatgccttttcaatatcataaaggcataaaacatctattgtttcagtctgacatgttaaggagagagaggaataaaactgaaaaataaacaaaaaacaactctagcatcttcgaaggagaaaatgatttccagtttagtgacacagcctcaaagacctaagcacaaacattaatggaagtacttacctggaaatcactgaaagggttttgtggttgtttttcttatgttttttcaaagtactctgtagaaaaaatcttgaaaagaaagcgctctgagatgtctacatcttaaaagaatagaatttttataatgcttatgacaactacttataaagtacatcagttaaaaaaaaatctcattgtgttttgctgtaataacctaaaagctgcttctgaaagtgcccaccagcccaggaagcagttcgtacactcagagatcacaactaagctgagaaggagcattgctgtcctcagacaagggctggggatgggggcaggagaaatgcaacataaaggcaggtgttttctttttcctgacccaaatgtcaggaagtgaaaaagtctacaaaacaatgttaactcatctgttcctcataatttgatttggaaaataattaagttgttattattaactccaataaagcacacagggagcctctgtgacataactattatgagattcattggactcaaactttgtaggactttttaactttgaagttgtaagcttgaggttgaaccaatgtagtatttctcactttattttttatagactttaaagccggaaaatgtactgaccttgggaatagcaagagaaagtacttcctttccctctcctgacaccaagtgatcccatccctgtgtttaggcctagtccaaccttctaagctgtgcgtcgcttccatgctttggagcattttacatatatttacccacttcatcctcaagacaataccattaagtatgcacgatcatcaactccattctacaaatgaagaaaccggcacagtgaaggtaagtagttttccctggtctcatagttagtaagggtagagcaagaatttgattccaggcagccctggagttcatggctcctagagattgtccttacctggcttgaccaacagtcccaggaaacaagttgtgaaggagacgcagtggattttattttgttgtgttttgtttggagggtttgtttgttgtttgataacattgatcttcatgtctccttaccctttctagaacttccttaaaatcatctaaagtctcctggcctgttgtcataggcctgaacattttctaaccaatgttatttaaacatttacatgccgtcttctccaggacactgtcttatttgtctttgtagctctcataggatttagtatccttgtttatacatagtaggttatatatatttttatgtgtgtgtagatttatatttatatgtatatgtatagttgtatgtgcatatggatgtatatgtatgtatgtatacatttagtatataccatgtcttaatcaattacacaatgttttgactctaccattctgcatgagaaaaccaagccatttctcacactcaaatttgaccatgcaaccacatgaatatgacagcactcgacatatcagacacattggaaaacattctgactttcccaaggtctcaggctatttatcaagctcaatacaaaaaagcatttcatgtacatgtgttttgaaacatttcagctgtttcatatcacatgctacttagaagtaggaaatgattgcagtatggttttaaaaatatggtacacaggtatttcttgtatttctataagtttcaaaagaaaatgacaattcaccaatttcttgctgaagacatgcgcataggcacacatggttttctcacctgcgcttatcatggtacctggttagtaagagtaaactctttagggctagtgagagaaggaagtaacatttcacaaattcgagaaagaaatgtaaagcaaaatagttaaaatagaggaatggaactagtaaagaaaacataagatactcttccaggaaaattattattattattattattattattttttgagatggagtctcgctctgtcgcctaggctggagtgcagtagcacaatcctggctcactgcaacctctgcctcccaggttaaagcgattctcttgcctcagcctcccgagtagctgggattacaggtgcatgccaccatgctggctaatttttggtatttttagtagagacaggttttcaccatgttggccaggatggtcttgatctcctgacctcgggatccacccatctcggcctcccaaagtgctgggatttcagacatgagccaccgcaccctgccgaaaattctttacactaaaaaatgataactcttgttactgtaagtttcttaaaatttcaatatagcaatttttagcattgtgcctacatagttcttaggacaaggaaggctacttctgatattctttgaagaatccttctatggatttttagatcctttttgtcaagaaatacctcaggtaatccttgcttagcaatgttttattaggtagagaacatggcagtatattttggatataatccaaatctacagtggggtggtacatgtgagaagtttgatacaacttaaaaagacctagtctggtgctcgctttggcagcacatatactaaaattggaacaatacagtgaagatcagcatggcctctgcacaaggatgacaagcaaatttgtgaactgttccatatgtttttgaacaatgataacacgtggaaacagggaggggaacatcacacattggtgcctgtcaggggatgggagacaaggggagggagagcattagtacaaattcctaatgcatacaggacttaaaacctaaatgacgggttgataggtgcagcaaaccaccatggcacatgaatacctaggtaacaaacctgcatgttctgtacatgtatcccagaactcaaagtaaaatttaaaacaatgaaaaaaaatactttaaattttaaaataaacttaaaatttacttagaaaacaaaaggcttagtctcaaattctagtccagactctgctaggcatgacctcctacattcctattgtccctctagagtaatgactttaatcaccaaaaaggggttgagtccgaagcttctgtagtttcttccttttctagaatgctatcaaaagcatctgattttggcagctcatattccaaatgtgccattaaagtcacaatttatgtgtctgactcaagtagattaataaagagtacagtcattaccacatgtattggatcaaaaaaactgtttactcttattttccctcttattgtattggcaacctacttccctaaattgactaaaactaatctgttgtttagaaagtcatgtagacataaattaggtgaggtaaagatggttttagtttagatccctaaatagggatcaacaatactctttttcctcctaacattcctggcttagtgacctgactttattttgactatattataaagcaaaggatatggtagttttagttaaattgttattataagctagtttggaatagtagtatcatataatgtgtgttcaataaaggaaattagtagacttgaaaacaattctttctatcctagagctcgtagtagaatagatttaacttattattttaagcaccttctaaattgttaataagatttgctgatgacaccctacacagtagcagtcagtcccccacggctaattttaaacatctgccttcataattaaacttattgtttatttcatcttaaaatgagaataatacagcacacagctatttcagaaatagatctatcactcctaaataattactagtcagagcattatcctacagataaagaaaatttatatcaataattcaataaatagatcccagtttcaagacaaatcacaatacagaccctgccatagactaaattgtgcttcttctccccgcaccccctcaccaccaccaaattcatagattgaatccctgatccccgttgtgactttatttggagatacaactgttactgaagtaatgaaagataaatgaggttatagggtggagccctgatcagacagtcttagagtccttataagtagagagaatgagaccagagctttctcctttgctctccactccaacagaccaaggaatgaccacatgagaacacagcaagaaggcatccacctgcacgccaggaagagagccctcacctgcaactgaattggctgacttcttgatcttggacttccagcctccagaactgtaagaaatagattttgttcttttctagttcctgacctcatcttccatcagcctcacctagctccctctgctccagctgtagagcctccttgctgtttgttgaatatgccaagtagttctttgccttaagatctttgcaggggctgttccctctacttggatttttttgtccctcagggtatctccctcatcctcttcagcctttgttcaaaactcaatttctcaatggtgattaccttatttaaaactgtcatctacctcctataaccacccctccagcatgactgatttacctgtcctgttctacttttgtttccatagcatttaatttacttatttattacagttatggtttattttgttttcccctaatagaatgtaaccttctacatcacaaagatttgtgtctgttttgttaatggttttgttcataggactaaaagagtgtctgacaaatagtaggtattcaaaaattgctgaatgaataatctaatataccacgaagatattaatatgttactaatcatctgaatatactaaaaatcacttataagtctaatcttctaatatagtaatatggtaatctaatataagttggtaagcatttgaagtgtcacaggtttccatggaagagacacatccttttgagtgtgctgactgagcattattgctagaggtaggcctctcacaggcctggttagaacagtcaggtattgctagacaagaaagcaataaaaaggaaagaatcttactgggcttcactgtggagatgaccagcaaacccatttggggatgcagtggtaatagcttaatgatcaaattgaggctgtgaatcagaattttaggtgaataacttaaatcaggatcatccagcaagtcttttgaaaaataaatccattggcctgatagattatgtgatggatcattaatctctggatgtaaaatttccagaaactgaggcatgagtacacagaggaaactgcacttgccatgctccccaaaaagaagagttcataaagtcaacatattcatcatcatgtatgtcaataaacatctttagagggagacttttgctctgaccctgggtgctgctgtgcccctgataacagatgaatttctttccttctgcaccacccccaaggcccgcaatctgtatggcatggacatattcatatggaagcaacaaaatttctcccacttcttccccggacacattgtttatcattttcaacttctacctaaagtgtggaatatatattttccttttaccaagacaaggtcctgttctcaacaatttgtttcaatggcccacaggggagaataggtgttttttcgcataaccacatgtgaaatgtggatttttctttcagcaatttctgacatatattttctctttctcttttctttgctttcgtgtctttcaaatctcttatggtgacacaaaattttgtgagcaaaataaaatgtctagaactcgtcaatgaaatttatttgaggataacttttttttaaactgtaatatatattttcatttcaattaaaatgtgaattccctttggttttcttcacttagagaaatgaaggaattttaatttaaatacgggaaagttctacattttttactatatactgtagtaagtactacgtgaatgcaaattggaaagggctatttccttaaaagtagaaatcatgcctggaaaaaaaattttttaaaaacttccaaattccaagcaataacaaagcatatgttaacactttctctgttaaaagttttatgttagtgtaggtggcttattacaaaggtctttctattggtttcagttgctaatgactataagcattgtcacctggttttgttatttcagaatgatgttgcagcatgttcccttacattacaacaatctctggccttttttctgagtcaaggtcaaggtaggaaacatcaagtttgaaaggaaaagggctactgcctactcttttaagcaagaaccatctttataaggacttaaagagtctcaaaatcatctcaaatattattaaaatgataggatatgaataataaataaaggttgtaatcaaaaacatcaggcaagatggcctagctatctaatgaaacaccaggctcttccatgagagctagtgactaggaagagccaagaggaggttaatggtacctctttagatcattcagcatgggctgtgtgacgtgattccatagtgtcttgcaatggccatcaacctctataggaaatggctaagtcacacaagaaagatgcatagcttcacatggtgtcagggagccccatacatgacttcagctgacaatgtattttagttcagtggttttcatcactgagctctaagatatagctaggcatgccaagaggaacaaactttcaataacttgaaaaaaaagtttttgtgtcttaccttgttgaaggctatgctcagtagcaatcttctaatacccacaggtgttagaaccactgaatcctgaatttgtttggatactgtgtgctctatagatttttttttaacttctaacaatctctgaaatgcatctaataatagatcttctgttactgactctagagtcaaggaaaattaagcatttcttccagatttggtctagggcaacttcttttaataagaggtgaagtcagtgaggtttcaatttgactttcagagtaattcaggttaatttatttttaaagagcacacatttggttgctatgtagggatttgcacacttgccgttatgggtaggatgaaaggaaatgggaatcatttctcccagaatgcttgctttcatgagttagactcagagtgattcatttcaccctattggtagtattcagcagagaaacagtcattgtactgttcagttcatcattgatatgaatttggctttagttacagagaaaaagatgcccacttaggtatatgaagggattgtgtcagtctcctaagagactcagaagggttaagcacagcttgaggaaaacccccaccatggcatttaggatctgaaagtccttagaggtgttgctatgccaagttcaagtccataaagctcacagcactttccacctgcttgagtccattcacccttagttttcaaccacacccaaaggcctcaggaagatgtatttttaactcctactacaccaagaaactgatctggctggctgtcatccattcccaaaactctttctgcctccaccatttctctggcaggaaatcctccaacgctgccttgctttaccatttaattgtgaactattcatgcatggccctccccagtgagtctgagggcctgtcaagtataaagtcagacctcagcttatgttggtggtttttcccctccttccctttacccctcccatagtgctttatcctgtgtacattttaagtaaattgctttactgaataggactataatcttttttttaattattattatactttaagtctggggtacctgtgcagaacggtgaggtttgttacataggtacacatgtgccatggtggtttgctgcacccaacaacctgtcatctacattaggtatttctcctaatgctatcccttccctagcctcccaccactctgcaggccccggtgtgtgatgttcccctccctgtgtccatgtgttctcattgttcaactcccacttatgagtgagaatatgtggtgtttggttttctcttcttgtgacagtttgctgagaatgatggttcccagcttcatccatgtccctgccaaggtcatgaactcatccttttttatggctgtatagtgttccatggtgtatatgtgccacactttctttatccagtctatcattgatgggtatttgggttggttccaagtctttgctattgtgaacagtgctgtaataaacatatgtgtgcatgtgtctttatagttgaatgatttataagcttttgggtatatagccagtaatgggattgctgggtcaaatggtatttctagttctagatccttaaggaatcactacactgtcttccacaatggttgaacgaatttacactcttacactaacagtgtaaaagtgcttctatttctccatatcctctccagcatctgttgtttcctgacttgttaatgatcgccattataactgacatgagatggtatctcattgtggttttgatttgcatttctctaatgaccagtgatgataagcattttttcatatgtttgttggctgcataaatgtcttcttttgagaagtgtctgttcacatcctttgcccactttttgatggggtggtttgttttttcttgtaaatttgtgtaagttctctgtagattctggatattagccctttgtcagatggatagattgcaaaaattttctcccattctgtaggttgcctgttcactctgatgatagtttcttttgctgttcagaagctctttagattaattagattccatttgtctattttggctttggttgccattggtcttggtgttttagtcaggaagtctttgcccatgcctatgtcctgaatggtattgcctatgttttcttctagggtttttatggttttaggtcttatgtttaagttcttaatccatcttgagttaatttttctataaggtgtaaggaagggatccagtttcagctttctgcatatggctagccagtttttccgacaccatttattaaatagggaatcttttccccattgcttgtttttgtcaggtttgtcaaagatcagatggttgtagatgggtggtgttgtttctgaggcctctattctgttccattggtctatatatctgttttggtaccagtaccatgctgtttttattactacagccttgtagtatagtttgaagtcaagtaacatgatgcctccagcttttttctttttgcttagggttgtcttggctacatgggctcttttttggttccatatgaaatttaaagtagttttttccaattctgtgaagaaagtcaatggtaacttgatggggatagcattgaatctatgaattactttgggcagtatggccattttcacaatactgattcttcctatccatgagcatggaatgtttttccatttgtttgtgtcctctcttatttccttgagcagtggtttatagttctccttgaagaggtccttcatatcccttttaagttgtattcctaggtattttattctctttgtagcaatagtgaatgggagttcactcatgatttggctctctgtttgtctgttattagtgtataggaatgctagtgatttttgcactttgattttgtaacctgaaactttgctgaagttgcttatcagcttaaggagatttgaggctgagatgatggggtttcctaaatatacaatcatgccacctgccaacagagaccatttgacttcctcttttactaattgaatactctttatttctttttcttgcctgattgccctggccagaacttccaatactatgttgaataggagtggtgagagagggcaccttgtcttctgccagttttcaaagggaatgcttccaatttttgctagttcagtgtgatattggctgtgggtttgtcatcaatagctcttgttattttgaggtatgttccatcaatacctagtttattgagagtttttagcatgaagggctgttgaattttgtcgaaggccttttctgcatctattgagataatcatgtggtttttgtcattggttctgtttatgtgatggattacatttattgatttgcgtatgttgaaccagccttgcatcccagggatgaagccaacttgatcgtggtggataagctttttgatgtgctgctggattcagtttgccagtattttgctgaggatttttgcattgatgttcatcagggatattggtctaaaattttctttttttgttgtgtctctgcctggttttggtatcaggaaaatgctggcctcataaaatgagttagggaggattccctctttttctattgattggaacagtttcagaaggaatggtaccagctcttctttgtacctctggtagaattcggctgtgaatccatctggtcctggaccttttttggttggtaggctattaattactgcctcaatttcagaacttattattggtctattcagggatttgaattcttcctggttaatcttgggagggtgtatatgtccaggaatttatccatttcttctagattttctagtttatttgcatagaggtgttcatagtattctctgatggtagtttgtatttctgtgggatcagtggtgatatccgctttatcatttttttattgtgtctacttgattcttctctttttcttgtttattagtttgctagtggtctattttgtcaatctgtttaaaaaaatgggtcctggattcattgatttttttaaagggatttttgtgtctctgtctccttcagttcatctctgatggtagttatttcttgtcttctgctagtttttgaatttgtttgctcttacttctctaatgcttttaattgtgttgtttgggtgttgattttagatctttcctgctttctcttgtggacagttagtgctataaatttccctctaaacactgctttagctgcaccccagagattctgctacattgtgtctttgttctcaaagaaagaacaaagaaaatctttctttatgccttcatttcattatttacccagtagtcattcaggatcaggttgttcagtttccatgtagttgtgtggttttgagtgagtttcttaatctgagttctaattcgattgcactgtggtctgagagactgtttgttatgatttcttttctttcacatttgctgaggattgttttacttcccattatgtggtcaattttagaataagtgtgatgtggtgctgagaagaatgcatattctgttgatttgggatggagagttctgtagatgtctattaggtgtgcttggtccagagctgagtacaagtcctggatatccttgttaattttctgtctcgttgatatatctagtgttgagagtggggtgttaaagtctcccactattattgtgtgggagtctaagtctctttgtaggtctctaagaacttgctttatgaatttgggtgctcctgtattgggtacatatatatttaggatagttagcttttcttgttccattgatccctttaccattacacaatggccttctttgtctcttttcatctttgttgggttaaagtctgttttatcagagactaggattgcaacccctgcttttttttgctttctgtttgcttggtaaatattccttcatgcctttattttgagcctatgtatgtcttttcgtgtgagatgtgtctcctgaatacagcacaccaatgggtcttgactctttatccaatttgccagtctgtgtcttttaattggggcatttagcccatttacctttatggttaatattattatgtgtgaatctgatcctgtcattatgatgctagctggttattttgcccattggttgatgcagtttcttcatagcgtcaatggtctttacagtttggtatgttttttcagtggctggtaccagttgttcctttccacgtttagtgcttccttcagggcctcctgtaaggcaggcctggtggtgacaaaatctctcagcatttgcttgtctgtaaagaattttatttctccttcgcttatgaagcttagtttggctggatataaaattctgggttgaaaattcttttctttaagaatgttgaatattggcccccactctcttctggcttgcagggttcctgctgagagatccactgttagtctgatgggcttctctttgtgaataacctgacctttctctctggctgcccttaacattttttccttcatttcaaccttgatgaatctgatgattatgtgtcttggcattgctcttctcaaggaatatctctgtggtgctctctgtatttcctgaatttgaatgttggccagccttgttaggttggggaagttctgctggataatatcctgaagagtgttttccaacttagttccattctccctgtaactttcaggtacaccaatcacacgtagatttggccttttcacatagtcctgtatttcttggaggctttcttcatgacttttcactctttttttctctaatcttgtcttctcgctttatttcattgagttgatcttcaatctctgatatcctttcttcttcttgattcatttggctattgatacttgtgtgtgcttcatgacgttctcatgctgtgtttttcagctccatcaggtcatttatgttcttctctaaacaggttattctagttagcaattcatctaaccttttttcaaggttcttaacttccttgcattgcattagaacatgctcatttagctcacaggagtttgttattacccaccttctgaagcctacttctgtcaatttgtcaaactcattctctgtccagttttgttcccatgctggcaaggagttgtgatcctttggaggagaagaggcattctggtttttggagttttcagcctttttacactggtttctccccatcttcatggatttatctacctttggtatttgatgttggtaatcttcagatgggggtctctgagtggacgtcttttttgttgatgttgctactattcctttctgttcgttagttttccttctaacagtcaggcccctcttctgcaggtctgctggaatttgctggaggtccattccagaccctgtttgcctgagtatcaccagtggagtctgcagaacagtaagattgctgcctgttccttcctctggaagctttgtcccagagcggcacctgccagatgccagcaagagttctcctgtatgaggtgtctgttggcccctactgggaggcgtctcccagtcaggacacatgagtgtctgggacccacttgaggaagcagcctgtcccttatcagagcttgaatgctgtgctgggagatccactgctctcttaagagctgtgaggcagggatgtttaagtctgctgaagttgtgaccacagtcacccccagggagatgggggttttatctataagtccctggctggtgcctttttaatcagagatgccctgcctagagaggcagactggcctcagcagccttgctgggctgtggggggctccatccagttcaaacttccctgcagctttgtttatactgtgaaggtaaaactgcctactcaaacctcagcaatggcatacgcccctcccccaccaagcttgagcatcccaggtggacctcagactgctgtgctggcagcaagaatttcaagccagtggatcttagcttgctgggctccataagggtgggacccaccaagccaggcaccggagggaatctcctggtctgctggttgtaaagaccatgggaaaattgcagtatctgggcaggagttcactgttcctcccagtacagtctctcatggcttcccttggctcggaacaggaaatcccctgaccccttgtgcttcctgggtgaggtaatgccccaccctgcttcagctcactctccatgggctgaacccactgtccaatcagtcccaatgagatgaactgggtacctcagttggaaatgcagaaatcacctgccttctgcactgatctcactgggagctgcagactggagctgttcctattcacccatcttgccaacaagttcctaggactgtcatcttttatagaaaaaaatgccttcagacagattggttctgtgactgtttataagtttatattctagccccatagacaaatttttcaaaaaagatcccaactgtaataacatttctcccaaggagtgattaaaaaccaaatctgaatggacactactgtcttactaatgggctgtggaaaatgcaataatgatgcttgtgaaattattagattcaggaataatgtattattctagaattgtgctaattcatttcccacttctgatcatttgaagtttacttctctctcattgaaaaggattaatgatatgtttattaaataaagactaattttattttatgttttttgtgtttttttttttgagatggagtctcgctgtcacccaggctagagtgcagtggcgcgatcttggctcactgcaggatccgccccacggggttcaagccattctcctgcctcagcctcccgcatagctgggactacagatgcccgccacctcgcctggctaattttttgtattttagtagagacggggtttcaccgtgttagccaggatggtctcgatctcctgatctcatgatccacctgcctccacctcccaaagtgctagattacaggcgtgagccactgtgctcggcccaaaaaagactaattttaaaagagctttgctggctcgactttatgtaaaaatagcatgaaagaaaaggagataataccatattttatgaaataccctctgagactcttctttgttaaagaaacaatttgtaaactgtcctgacattataaactctttgtcttcttagtctgacatgagggtgccaagcttagtgatttgtagcatggaaagatgagtgctgtagctggacactcgtagtcacacaaaggttctgttggtttggaaggtgagcgtttcatattcttgccccacaagtaagccaatgttccaccccagggacaagtatatttcctgaattatgagaaggagcaagagagcatgtccatcccatgttcttgagaagtcctggctcgagccaataaagctcatcgttgtctgaaagaatggagatcaatttcagtctgctgtcacacagactctggcagccggagatcaacaggatctcataacagtaaacctggtgctttccagggcagagccccaagttgctaacagcctctcagacttaaaaaagtaagttcacacagaacaattgtattctcacagtcagcattgtgatcttcctctggttcttcatatatttaataaacctttaaaaccagaatcctgagaaatgtcccatcccttcccacacaaacacatcagcctcttctactatgtactcatacacactgaccagcattttcttttttatcttaggaactaacagaatcaaagatatggagttttaaggttatcttttgaagcagacctttactttatgaagataattattaaagtatattgatactctgttgaggcatattgctccaggggtcttgacattttgttggtctaattatctgcagcaaatacggtatccaaagttcccagtgtggggaaaagaaagagagatcagattgttactgtgtctgtgtagaaagaagtagacataggagactccattttgttctgtactaagtgtcaggcctctgagcccaaggcaagccatcgcataccctgtgacttgcacgtatacacccagatggcctgaagtaactaaagaatcacgaaagaagtaaatatgccctgccccaccttaactgatgacattccaccacaaaagaagtgtaaatggccggtccttgccttaactgatgacattaacttgtgaaagtccttttcctggctcatcctggctcaaaaagcacccccactgagcaccttgcgaccccccctcctgcccactgagcaccttgcaacccctactcctacccgccagagaacaaaccccctttgactgtaattttcctttacctccccaaatcctataaaatggccccacccttatctcccttcgctgactctcttttcggactcagcccgcctgcacccaggtgaaataaacaaccatgttgctcacacaaagcctgtttggtggtctcttcacacggacgcacatgaaatttggtgccgtgactcggattgggggacctcccttgggagatcaatcccctgtcctcctgctgtttgctccatgagaaacatccacctacgacctcaggtcctcagaccgaccagcccaagaaacatctcaccaatttcaaatctggtaagcggcctctttttactctcttctccaacctccctcactatccctcaaactctttctcctttcaatcttggtgccacacttcaatctctcccttctcttaatttcaattcctttcattttctggtagagacagaagaggcatgttttatctgtgaacccaaaactctggcgccggtcacggactgggaaggcagccttcccttggtgtttaatcattgcagggacacctctctgattatacagtcacatttcaagggtgtcagaccacacagggatgcctgccttggtccttcacccttagcggcaagtcccgctttcctggggcaggggcaagtacccctcaaccccttctccttcacccttagtggcaagtcccactttcctagggggcaagaagcccccaattgcttatttccgcaacccaacctcttatctctgtgccccaatcccttatttctgcaccctgacctcttatctctgtgccccaatcccttatttccatgccccaaccccttctttgcttttctggagggcaagaaccccccgccccttctccgtgtctctactcttttctctgggcttgcctccttcagtatgggtaagcttccaccttccattcctccttctcccttagcctgtgttctcaaaaacttaaaaccttttcaactcacacctgacctaaaacctaaatgccttattttcttctgcaatgccgcttgaccccaatacaaactcgacagtagttccaaatagccagaaaatggcactttgaatttttccatcctgcaagatctaaataattattgtcataaaataggcaaatggtctgaggtgcctgacgtccaggcattcttttacacactcagtcccttcctagtccctgtgcccagtgcaactcgtcccaaatcttccttctttccctcccacctgtcccctcagtaccaaccccaagcgtcgctgagtctttctaatcttccttttctacagacccatctgacctctcccttcctccccaggctgctcctcgccaggccaagctaggtcccaattcttcctcagcctccgctcctccaccctataatcttttcatcacctcccctcctcacagctggtccggcttacagcttcattccgtgactagccctcccccacctgcccagcaatttactcttaaaaaggtggctggagcgaaaggcatagtcaaggtgaatgctcctttttctttatcccaaatcagatagcgtttaggctctttttcatcaaatataaaaatccagcccggttcatgacttgtttggcagcaaccctgagacactttacagccctagaccctaaaaggtcaaaaggccgtcttattctcaaaatacattttattacccaatctgctcctgacattaaataaaactccaaaaattaaattctgaccctcaaaccccgtaacaggatttaattaacttcaccttcaaggtgtacgatagtagaaaaaagtttcaattccttgcctccactgtgagacaaaccccagccacatctccagcacacaagaagttccaaacacctgaaccgcagtggccaggcgttcctccagaacctcctcccacaggagcttgctacacgtgccggaaatctggccactgggccaaggaatgcccgctgcccgggattcctcctaagctgcgtcccatctgtgtgggaccccactgaaaatcggactgttcgactcacctggcagccactcccagagcccctggaactctggcccaaggctctctgactgactccttcccagatcttctcggcttagcggctgaagactgacactgcccgaacgcctcggaagccccctagaccatcacggatgctgagctttgggtaactctcacagtggaaggtaagccagtccccttcttaatcaatacacaggctacccactccacattaccttcttttcaagggcatgtttcccttgcctccataactgttgtgggtattgacggccaggcttctaaacctcttaaaactccccaactctggtgccaacttagacaatactcttttaagtactccttttatttatccccacctgcccagttcccttattaggctgagacactttaactaaattatctgcttccctgcctattcctggactacagctatatctcattgccacccttcttcccaatccaaagcctcctttgcgtcctcctcttgtatccccccaccttaacccacaagtataacatacctctactccctccttggtgaccgatcatgcaccccttaccatcccattaaaacctaatcacccttaccccactcaacgccaatatcccatcctgcagcacactttaaaaagattaaagcctgttatcactcgcctgctacagcatggccttttaaaccctataaactctccttacaattcccccattttacctgtcctaaaaccagacaagccttacaagttagttcaggatctgcaccttatccaccaaattgttttgcctatccaccctgtggtgcccaacccgtacactcttttgtcctcaataccttccttcacaactcactattccgtgcttgatcttaaagatgcttttttcactattcccctgcacccctcgtcccagcctctctttgctttcacttagactgaccctgacacccattaggctcagcaaattaccaaggctgtactgctgcaaagcttcacagacagcccccattacttcaatcaagcccaaatttcttcctcatctgttacctatcttggcataattctcataaaaacacacgtgctctccctgccaatcatgtctgacctctcaaaccccagcaccttctacaaaacaacaactcctttccttcctaggcatggttagtgtggtcagaattcttacatagccaggaccacaccctgtagcctttctgtccaaacaacttgaccttactgttttagcctagccctcatgtctgcgtgcagtggctgccgctgctttaatacgtttagaggccctcaaaatcacaaactatgctcaactcactctctacagttcttataacttccaaaatctattttcttcctcatacctgatgcatatactttctgcttcctggctccttcagctacactcactctttgttgagtctcccacaattaccattgttcctggcctggacttcaatccggcctcccacattactcctgataccacacctgacccccatgactgtatctctctgatccacctgacattcaccccatttccccaaatttccttctttcctgttcctcaccctgatcatgcttgatttattgatggcggttccaccaggcctaatcaccacacaccagcaaaggcaggctatgctatagtatcttccacatctatcattgaggccactgctctgcctccctccactacctctcagcaagctgaactagttgccttaactcaagccctcactcttgcaaaaggactacgtgtccatatctatattgattctaaatatgcctttcatattctgcagcaccatgcagtcatatgggctgaaaaaggtttcctcactacacaagggtcctccatcattaatgcctctttaataaaaactctgctcaaagccgctttacttctaaaagaagctggggacattcactgcaaggggcatcaaaaggcatcagatcccattgctctaggcaatgcttatgctgataaagtggctagacaagcagctagctttccaacttctgtccctcacggccagtttttctccttcacttcagtcactcccacctactcccccactgaaacttccacctatcaatctcttcccacacaaggcaaatggttcttaggccaaggaaaatatcttcttctagcctcacaggcccattctattctgtcgtcatttcataacctcttccatgtaggttacaagccgctagaccgtctcttagaacctctcatttcctttccatcatggaaatctatcctcaaggagatcacttctcagtgttccatctgctattctactacccctcagggattgttcaggcctcctcccttccctacacatcaagctcggggatttgcccctgcccaggactagcaaattgactttactctcatgcctcgagtcagaaaactagaatatctcttagtctgggtagacactttcactggatgggtagaggccttccccacagggtctgagaaggccaccgcggtcatttcttcccttctgtcagacataattcctcggtttggccttcccacctctatacagtctgataatggaccagcctttactagccaaatcacccaagcagtttctcaggctcttggtattcagtggaaacttcatatcccttaccatcctcaatcttcaggaaaggtagaacggactaatggtcttttaaagacacacctcaccaagctcagcctccaacttaaaacagaatggacagtacttttacctcttgcccttctcagaatcagagcctttcctcgagaagctacagggtacagtccatttgaactttcatatggatgcactttcttgcttggccccaacctcatcccaggcaccagccctctaggtgactatcttccagtactccagcaggctagacaggaaattcaccaggctgctaatcttctcttgcctactccagatccccagctatatgaagacaacctagctgggcgatcagttcttgttaagaatctgacccctcaaactctacaacctcgatggaccggaccctacttagtcatctatagtaccctgactgccgtccgcctgcaggatcctccccactgggttcaccgttccagaataaagctgtgtccatcggacagccagcctaatccctcctcttcctcctggaagtcgcaagtactctcccccacttcccttaaactcactcgtatttctgaagaacagtaataacacttacgagcctaatacatcccttcattctattaggtctgttcgtccttaccctactttttgcaacagggctttaagaagtcaccccaccacttaggccaagccccaaaaaactagtcatccctactatcttctgtccggtcatactcctattctccattctcaactacttataaatgctctactcttgtttacaccgctggtttacactgtttttccaagccatcaaagctgatatctcctggtgctatccccaaactgccactcttaactcttgaagtaaataaataatctttgctggcagggctatgctgaatctccttaggcactctctaattagatgtcctaggtcctcccaattcttagtccttttatacctgtttttctccttctcttattccatttagtttttcaattcatataaaaccgtatccaggccatcaccaatcattctatacgacaaatgtttcttctaacatccccacaatatcaccccttaccacaagacctcccttcagcttaatctctcccactttaggttaccacgccgccccaatcccccttgaagcagccctgagaaacatcgcccattctctctccatatcaccccccaaaaattttcaccgccccaacacttcaacactattttatttttcttattaatataagaaggcaggaatgtcagccctctgagcccaagccaagccatcgcatcccctgtgacttgcacgtatacacccagatggcctgaagtaactaaagaatcacaaaagaagtgaatatgccctgccccaccttaactgatgacattccaccacaaaagaagtgtaaatggccagtccttgccttaactgatgacattaccttgtgaaagtccttttcctggctcatcctggctcaaaaagcaccccccactgagcaccttgcgacccctactcctgcccactgagcaccttgtgatccccactcctacccgccagagaacaaaccccctttgactgtaattttcctttacctccccaaatcctataaaatggccccacccttatctcccttcgctgactctctttttggactcagcccacctgcacccaggtgaaataaacagccatgttgctcacacaaagcctgtttggtggtctcttcacacggatgcacatgaaactaagaaaaattcttctgccttgagatgctgttaatctataaccttatccccaaccccatggtctctgaaacatgctgtgtccactcagggttaaatggattaagggctgtgcaagatgtgctttgttaaacagatgcttgaaggcagcatgctccttaagagtcatcaccactccctaatctcaagtacccagggacacaaacactgcagaaggccacagggacctctgcctaggaaagccaggtattgtccaaggtttctccccatgtgatagtctgaaatatggcctcgtgggaagggaaagacctgaccatcccccagcccgacacccataaaagttctgtgctgaggaggattagtataacaggaaggaatacctctttgcagttgagacaagaggaaggcatctgtctcctgcccgtccctgtgcaatggaatctcttggtataaaacccgattgtatgttccatctactgagataggggaaaacagccttagggctggaggtgggacatgcgagcaacaatactgctctgtaaggcattgagatgtttatgtgtatgcatatctaaagcacagcacttaattctttaccttgtctatgatgcagagacctttgttcatgtgtttatctgctgaccttctctccattattatcctatgaccctgccacatccccctctccaaaaaacacccaagaatgatcaataaatactaagggaactcagaggctggcgggatcctccgtatgctgaacgctggtcccctgggcccccttatttctttctctatactttgtctttttcttttccaagtctctcattccacctaatgagaaacacccacaggcatggaggggcaacccaccccttcatctggtgcccaacgtgggggcttttctctagagtgaaggtaggctcgagcgtggttattgaggacaagtcgacgagagatcccgagtacatctacaatcagccttacggtaagctcgtgcgctcagaagctagggtgacaatggggcaaactcaaagtaaaactaaaagtaaatatgcctcttatctcagctttattaaaattcttttaaaaagagggggagttagagtatccacaaaaaaaaatctaatcaatctatttcaaacaatagaacaattttgcccatggtttccagaacaaggaactttagatctaaaagattagaaaagaattggtaaagaactaaaacaagcaggtagggagggtaatatcatcccacttatagtatggaatgattgggccattattaaagcagctttagaaccatttcaaacagaagaagatagcgtttcagtttctgatgcccctggaagctgtgtaatagattgtaaagaaaagacagggagaaaatcccagagagaaacagaaagtttacattgcgaatatgtagcagagccggtaatggctcagtcaacgcaaagtgttgactataatcaattacaggaggtgatatatcctgaaacgttaaaattagaaggaaaaggttcagaattagtggggccatcagagtctaaaccacgagggccatgtcctcttccagcaggtcagatgcccgtaatattacaacctcaaacgcagtttagagaaaataagacccaaccgccagtagcttatcaataatggccgccagccaaacttcagtatcggccacccccagaaagtcagtatggatatccaggaacgctcccagcaccacagggcagggcgccataccctcagccacccactaggagacttaatcctatggtaccacctagtagacagggtagtgaattaccagaaattattgataagtcaagaaaggaaggagatattgaggcatggcaattcccaataatgttagaaccacctggagaaggagcccaagagggagagcctctcacagttgaggccagatacaagtctttttcgataaaaatgctaaaagatatgaaagagggagtaaaacagtatggacccaactctccttatatgaggacattattagattccattgctcatggacatagactcattccttatgattgggagattctggcaaaatcgtctctctcaccctctcaatttttacaatttaagacttggtggattgatggggcacaagaacatgtctgaagaaatagggctgccaatcctccagttaacatagatgcagatcaactattaggaacaggtcaaaattggagcactattagtcaacaagcattaatgcaaaatgaggccattgagcaagttagagctatctgccttagagcctgggaaaaaatccaagacccaggaactgcctgcccctcatttaatacagtaagacaaggttcaaaagagccctaccctgatttggtggcaaggctacaagatgttgctcaaaagtcaattgctgatgaaaatgcctgtaaggtcatagtggagttgatggcatacgaaaacgccaatcctgagtgtcaatcagccattaagccattaaaaggaaaggttcccgcaggatcagatgtaatctcaggtatgtaaaagcctgtgatggaactggaggagctagcataaagctatacttatggctcaagcaatagcgggagttgttttaggaggacaagttagaacatttggagggaaatgttataattgtggtcaaattggtcatttaaaaagaattgtccagtctcaagtaaacagaatataactattcaagctactacgacaacaggtaaaaagccacctgacttatgtccaacatgtaaaaaaggaaaacattgggctagtcaatgtcgttctaaatttgatagaaatgagcaaccattgtcgggaaacaagcaaaggggctagcctcaggccccacaacaaactggggcattcccaattcagccctttgttcctcaagggttttcagggacaacaacccccactgtcccaagtacctcagggaataagccagttaccacaatacaacaattgtcccccaccacaagcaacagtgcagcagtagatttatgtactatacaagcagtctgtctgcttccaggggaacccccacaaaaaatccccacaggggtatacggcccgctgcctgaggggactgtaggacttgtcttgggaagatcaagtctaaatccaaagggagttcaaattcatactggtgtggttgattcagactataaaggtgaaattcaattgattattagctcttcaattccttgcagtgccagtccaggagacaggatttctcaattattactcttgacttacattaaggttggaaatagtgagataaaaagaacaggaggatttggaagcacggatctgacaggaaaggctgcatattgggcaagtcatgtctcagagaacagaactgtgtgtaaggccgttattcaaggaaaacagtttgaaggattagtagacactggaccagatgtctctatcattgccttaaatcagtggccaaaaaattggcctaaacaaaaggttgttacggggcttgtcagcataggcacagcctcagaagtgtatcaaagtactaggattttacattgtttagggccagataatcaagaaagtacttcccatgctaaaaaacatttattatcttgttttgctgtaatgggagttccagaaaaaattaaaactgacaatggaccaggatattgtagtaaagctttccaaaaattcttacatcagtggaaaatttcacatacaacaggaattccctataattcccaaggacaggtcatagttgaaagaactaattgaacactcaaaactcaattagttaaacaaaaagaagggggagacagtaaggagtgtgctactcctcagaggcaacttaatctagcactctatactttaaattttttaaacatttatagaaatcagactactacttctgcagaacaacatcttactggtaaaaagaacagcccacatgaaggaaaactgatttggtggaaagataataaaaataagacatgggaaatagggaaggtgataacgtgggggagaggttttgcttgtgtttcacgaggagaaaatcagcttcctgtttggatgcccactagacatttgaagttctacaatgaacccatcggagatgaaaagaaaagcgcctccatggagatggaaacaccactcacatggatggataatcctattgaagtatatgttaatgatagtgtatgggtacatggccccacagatgatcgctgccctgccaaacctgaggaagaagggatgatgacaaatatttccactgggtatcattatcctcctatttgcctagggagagcactaggatgcttaatgcctgcagtccaaaattggttggtagaagtacctactgtcagtcccatcagtagattcacttatcacatggtaagtgggatgtcactcaggccacgggtaaataatttacaagactttccttatcaaagatcattaaaatttagacctaaagggcaaccttgccccgaggaaattcccaaaggatcaaaaaatacagaagttttagtttgggaagaatgtgtggccaatagttcagtaatattacaaaacaatgaattcagaactattatagattggacatctggaggtcaattctaccacaattgctcagggcaaactcagtcgtgacccagtgcacaagtgagtccagctgttgatagcgacttaacagaaagtttaaacatttctggtcatgaacatccaaaattatggaggcttactgtagcctcataccacattaggatttgatctggaaatcaaactttagaaacaagagatcataagccattttatactatcgatctaaattccagtctaacggttcctttacaaagtttcataaagcccccttatatgctagttgtaggaaatatagttattaaaccagactttcaaactataacctgtgaaaactgtagattgattacttacattgattcaacttttaattggcagcaccgtattctgctggtgagagcaagagaaggcgtgtggatccctgtgtccatggaccgaccatgggaggcctcgccatccatccatattttgactgaagtattaaaaggcattttaaatagatccaaaagattcatttttactttaattgcagtgattatgggattaattgcagtcacagctacggctgctgtggcaggagttgcgttgcactcttctgttcagtcagtaaactttgttaatgattggcaaaagaattccacaagattgtggaattcacaatctggtattgatcaaaaattggcaaatcaaattaatgatcttagacaaactgtcatttgggtgggagacagactcatgagcttagaacatcatttccagttacgatgtgactggaatatctcagatttttgtattacaccccaaatttataatgagtctgagcatcactgggacatggttagatgccatctacagggaggagaagataatctcactttagacatttccaaattaaaagaacaaattttcaaaacatcaaaagcccatttaaatttggtgccgggaactgaggcaatcgcaggagttgctgctggcctctcaaatcttaaccctgtcacttgggttaagaccattggaagtactactattataaatttcatattaatccttgtgtggctgttttgtctgttgttactctgcaggtgtacccaacagctccgaagagacagcgaccatccagaacgggccatgatgacgatggtggttttgtcgaaaagaaaagggggaaatgtagggaaaagaaagagagatcagattgctactgtgtctgtgtagaaagaagtagacataggagactccattttgttctgtactaagaaaaattcttcagccttgagatgctattaatctgtaaccctacccccaaccctgtgctccctgagacatgtgctgtgtcaactcagggttaaatggattaagggctgtgcaggatgtgctttgttaaacagatgcttgaaggcagcatgctccttaagggtcatcaccactccctaatctcaagtacccagggacacaaacactgtggaaggctgcagggacctctgcctaggaaagccaggtattgtccaaggtttctccccatgtgatagtctgaaatatggcctcgtgggaagggaaagacctgaccgtcccccagcccgacacccgtaaagggtctgtgatgaggaggattagtataagaggaaggaatgcctctttgcagttgagacaagaggaaggcatctgtctcctgcctgtccctgggcaatggaatgtctcagtataaaacccgattgtatgttccatctactgagataggggaaaacagccttagggctagaggtgggacatgcgggcaggaatactgctctttaaggcattgagatgtttatgtatatacatatctaaagcacagcacttaattctttaccttgtctatgatgcagagacctttgttcacgtgtttacctgctgaccttctctccactattatcctatgaccctgccacatccccctctccgagaaacacccaataatgatcaataaatactaagggaactcagaggctggtgggatcctccgtatgctgaacgctggtcccctgggcccccttatttctttctctatactttgtctctgtgtctttttcttttccaagtctctcgttccacctaacgagaaacacccacaggtgtggaagggcaacccaccccttcatgtaatgtccatttaaatccataataaatggtatgcccagcctggcacgggctattgatgagtcttttgagggctggcatacatgcaacccactcaccttacccttacctccttgccaacttccctgtattgccttattactcagtcagactacacccagtctcagaaaaacaaggaaaagtgaaggaaacattgtcgatgactgagtcaggggttaattggtctcttatcatttaaacatgaaggaaagaatgtgaaagaagaaaatgatagacaagtaaaattctctagatcaatcctggagataattgtgtaaaactttgccaagtatttacctagttacaagtgctaatcactttcacgtaaaaagccttaataaactctacacagcacattattttgaatccactaaaatctaaatctgaactgtgttagatctcttctttctaaaaagtttgatatacagacctgtattacatttaaagaacactgtgagaaattcaaaaatactgagacattgatgagctgggcacttggctcaggctcctatgagacttacgatttcaaatttgctccatcaggctaattaaagggagcctgaaaaaaaagcaaaatggactaaattgggaagtcttaggatatattttaagctgggttatttaaccatctcttgtttgaaagaaatctagtaataagaatgaaaattgtgtaatggatttttttttttgtaggcatcttgtttttattgaacagatagactctattgattttgatcataaaataaatttctataagggaaagactattttccctcactgacctctattctaaatcagagaagtagtcccagagaaaaataataatacgatggtaagtgagaatagcatctcctttcaaaaaaatataactcaagaagggcctacaactacctttctcctagatcataatgttacagtctaagaggtagggttttctaatgtatttccaccatatattacacaagtaaaatttaatttggagcaataggttctattctctggatgaggtaatcctaccattgatttattcagtaaatatttttataatgtctaataacaccgtgtacttgaggaaattaaataaattaggttcttgacagtctctatatagcaaacacacagtggaatgtcaaataaacaatatttattaaatatatacaatataaattcagtattattccaagactgtagggttggtggaagaagtacggagaaataaaagaagattgagttcttagattatgaaattaacaaacttgaatatcatgcagtattttttggaggcatcatgtacagattgaagaatcccatcaggtgtttagcaaaatgaatgaaaagtaaagagcataatataaaataaaaggtcaaatttaattatccatatatattatattaataaataaatggtatagaaatcacctattataacacaaagactctcagagtggacacagagtaaaatataagtaaatgtagcatatgagtcatttacaacaaagtgacttataaagccctttagaaattttaaaatatggttcctgaaattaaaaaataataataataccatggttggaagataaagtcaaggtaccatgataaaattaaaggaaaatgaaaatgctcaataaatgtccaggtcattgaattaaaacacacacacatacacacatacacacacacacacgaaagtaggtcaaattcaaaggtaccagacaacagatattctaataacaacatgggctgctaaaatacaaagaagtgctttcaaaattccaggagaaaataatttcaatttcaatttctggaatcaaatgtggtagaatgaagtattttggtgtctcataaaatctatctcctacgtacactttcttagaaaactactggtagatgtaatacagtaaagcaatggcttaaactaagaaagaggaagacatgttttccaaacataatagctccaactacaaagcctaaatatgtcctaggatgacaccagggcagcaaggctagagagaaaccagcacaaattggagaagggtggaagatttcaggaaagaggacttcaggaattgttaaaatagatgatatgataaaacattctgatacaattaaggatatacggaaaacaataagagaatcaacaacagtgataatggttaacgtatatcgaactaattgttaaaatagatgatataattaaacattccaatataattaaggatatatggaaaacaagagaaacaacagtgataatggctaacatacattggtagagagaattatgcaactaaaaacattatacaaggactcaattattaaatttagggaaaaatgctttataaaatggaaaaatgatttggcatacactagttgcgcctaccattaccaaaatacatatagtaataataagatgagtaatgatagatttaactaaaaatactgaggtcactgactttaggaagatggtatgaagaaaagaatggaatttgaaagagcaatgttttcatttattgtaataggaaattaatatataatgtccagaattggtaattcaaataaaagcaatgtaagaatattgtttctaaatgttaaaacaactaccagaagaaacagttaagagttaaagggattgccacacagagtatgactgtgtatcagactgggtttttgtaaaaattataaaaccgccagagataatttactttttaaaattattaaatgtacttggtttatttaaaatgtttagtaaagtaaaaggtatgcattacaaaataaagaaagaactaagtggtactttcaaagatctccattacttaaaacacttgctccagctgtttttactctatgacatacactgaagtgtgtttgctaattcctgaggtataaatagtcccattacagtttatttcaagctactaacatgacatcacagaatgtggagttgagaagagatgcaaagtaacacaccattattatagtaacttcatcatacagatacagtaaatgtgaataaccttaagagcacagataataccaaaatatagtaaaattattaggaaatgatgagttttgtgtatctattaactttatttttaatataatttatttgtttataaaatttagttttttaatggttgtatggaaagcatgtaaagttttcagaaatttaacaatcgtccctcagaagcctatatgagccagcttcagcttacagctaatattgagatgcccaccatattcctgtggagtgggatgggatattagctggctggctggctggctggatggatggataaatggatggatggatggatggatggatggatggatggatggatggatggatggatgattagtcaaaatgtaactaacagaaatgattaaccacccaataggcaattctcaggactgagtttcctcttctgtgattaataccttaaaattcaaagacaacctacccataatgatagtcgctctgtgtggtggctttagtcaagcgttgttcattgttgttttataaaaagcacaattggttattttctgacacttttggccacattttttttttttttttttttttgagacggagtctcgctctgtcgcctaggccggactgcggactgcagtggcgcaatctcggctcactgcaagctccgcttcccgggttcacgccattctcctgcctcagcctcccgagtagctgggactacaggcgcccgccaccgcgcccggctaattttttttttttgtatttttagtagagacggggtttcaccttgttagccaggatggtctcgatctcctgacctcatgatccacccgcctcggcctcccaaagtgctgggattacaggcgtgagccaccgcgcccggccggccacatttacataaagtaaaatttggatgtttcatcaagtagaatatcaacaaatctaaagaaattatcaataattatcagttaccataaatctgggcctagagtgaatatttacctgaattacctgatgaaactatgttagaattaagttcttcaagtaaattacaagcacttgtgggcagattttgtgtctggtttgtttttctaacttccttagcaccaatacaatgtttaaaactagattggaatataccactcaatattacagttatttttatgtttttgtcttctgataactatgggatctacttgagggtgaaattttcatcttgtcaaatctatacaccaatgcctagtttatattaacctctcactaaatattagttcggttagattgaagagtgtccaatacatatatattgaattaaattaattagactagatcagaatttaatttgatgtcatcttagcataatcctaaaaaagctatcaaacaggctaagttttgtgtcattaggtagtataatgtatacaagggtggattcaaattccagctcatttcttatgagcttccagatcttcatcaagtatgtaatctctataaacttcattttccccacgctaacaagtagataatatggttgttatgattaaatccatacaaagtacttagcataatacctggcacacagtaagctcttaataaatgtttgctgttatattgctatgctttatgctctagataaatctgaaatgtgcttataatatatgatttgcctgaagggtgacctaggtctttaaaacagtgacacatttgcaattgaccatcacagggcttctcacaaaattgaactttataatgccatcggattgtcatagtttcccttctagaaagggaacctatgattcattaagctaaatcaagactaagtatcaagtgactattgccttttgatttgttttcttgccttaggtttgccttgatgatctggcatgttaatagaagccacgtattggtctctgtgttatctcattggatttcctgccgaccatggagattgacgggttttattagccctcacaggaaaactgattctcaaagtcaaaaatctcaagcatagaatacaagatatggacccatcgatccccactacaaaaagcctttcctagtacagactactgcctctcaaagattgcgtttctcatctcacttttcttaccaagatttctcccttgaaaaatccagggaaatcaattatgtgtgttcattcctgatcctcagttgttaacataaagttgtatactgaggcaaatttaaaacatagctgaaaatcctttgacattgatacggtttgactctgtgtccccaaacaaatctcacctcgaattgtaattcccataatcccacatgtcaagggcgggaccaagtggaggtaattggatcatgagggtggtttctcccatgctgttcttgtgatagtgagtgagttctcacaagatctgatggttttatgggcatctggcatttcccctgcttgcactcactgactctgtcctgccactctgtgaagaaggtgccttgcttccccttcaccttctgctatgattgtaagtttcctgaggcctccccagccatgctgaactgtgagtcaattataccgttttcctttataaattactcacccccacctaccaccttttagataatgctgtgggacataaagacttagaattctctcttcaaagggcttggatatggcttccagggttcatgtttctctcctccagttctgtctttcatggtgagccatgtatagagagcgcacaactagaggccctgtgggccaatgcaaagctgtttaccagaggtacagtggtagactgagcttggacatatccacagaggtacccaaaatgtgtacacacaaggcctgtcatggtgtgagaccacattgggggaccagctctccccatgcccttatattctggtactggactttgagggcccaagaattccagctctaaacttgaatttcattaggaagctacatgtgtcaaagtgggaaaacaaagcatacttaacagtttgttaacatgatttataacttttaaatatttaaacatgtactatataggtttttattattattcttgccctaggccttaagaatgttaagtgtaagacaattaaatactttattagatataagaatgcaagcacagatactcagaaacttaaatataagtctcaaactagtccttacttttaaaaaataatgatatattccatttaacatcatatttagagtggatccattatggcatcatgacatctttgctggttcagttacaattgaacaaagtattgggcctgacatcaacactatttctcaaaatgctaaagatataaaagtgtgggacagatatgtcttatgcttattttgtaacataactattcattgcatatatccaaacatcactacatactccataagatttagtcttatttacaattatttagttgtttacctaatatttgctatgtaatacacacacacaggcacacacctacacacacatatgtgcacacatacacacatgtgcacacatatatatttcaaatacaaaccataagaagcagccaggatgaatccagaggacattatgttaagcaaaataagctaagaacagaaagttaaatagtgcatgttctcaccgtatgtggatgctaaaaaatagaagatctcatggaaggaaaaagtagaacagaggatactagaggctggagaggtgggtgagagatggataaggagagatttgtcaaaaaatacaaaattacagctagacaggagaaataagttctagtgttctatagcactgtgagatgactatagttgacaataatatatagcttcaaattgctagaaggagtatattgaatgttcccatcacaaagaaatgataaatgtttgacatgatgcatatgctaattaatctcttaactattcattgtatgtatccgaacatcactacataccccataaatatgtacaattattatatgtcaattaaaaaaataaaataattaagaaaaaattgcaaaagattaaataactgtaacagtagatttgtgctctcaaatattaaagcattctataaatttacatagaatgggggtagatatataaaaattaaaaataattgaaatggaatctgggtgatagattgacaatactactcttaatattaagaatagtatagctgaaccaaagtttaacatgttcaaacctttacataaatgtatcctctctaaacgatttgaccctgcttatggataattaaggttgtaatattttggacataaacgcctgtttacttataccagaatatatcagcaattataattaaaatgatcttacatattatttgtcatatcaggactcatactatttttattatgctgaaggtatatggtgaattttttattttttttttttgagatggaatctcgctttgttgccaggctggggtgcaatggcgcgatcttggctcactgcaacctctgcctcccaggttcaagcaattctccttcctcagcctcccaagtagctgggattacaggcacatgccatcacactcagctaatttttgtatttttagtagagatgaggtttcaccatgttggccaggctagtctcaaactcctgaccttgtgatccacccgccttggcctcccaaagtgctgggattacaggtgtgagccactgcgcctggccgcttttttatcactatgatttactcatctacctttttacaaaaagaaaatgagatctcagtaacaactggcagcactatgttcctctgatgtatatgaaatatttaagttctaggcttgctcaggtataagcagagtattcataatgtcatcgtttacataaagtataaatgcacaacaccaggaatacttcaaagacaaaaagcagaaattatgctttaatgtattattacaggaaatgttggtatcttgtgcatttgtgatttggagcattgaatgtttatgacatgtttcacttgccaattttctgtctttatttggtagcagccatttattcttgaatcttattaatacatttacattcagtgtattgtttatttcatttcataaactatgacacctgagcgaaaatgactgggtttcttaatctgtacaaatcagggaggacttacaggacatggaagctgatttgtacagtatccaaagtatccattagcaagcaagctcatagggttgttgtaaggattaaaagagaaacccttatagtcaatgctacatattattattattattatttttactttttttttttttagacagagtcttgctcagtcaccaggctggagtgcagtggcatgctctcagctcactgcaacctctgcctcccgggttcaagcgattctcccgcctcagcctcccgagtagctgggactacaggcgagagccaccatgcccagctaatttttgtatttttagtagagatggggtttcaccatgttggccaggatggtctcgatctcttgacctcgtgatccccccgccttggcctcccaaagtgctgggattacaggcatgagccaccgcaccctgtcttatctcttttttataaacaaatatgagatctttaaacgcatactgtctctagattcccttggttgtgctgtttgtatatttggtgtcccatgtgaagtgcttagaaccagacctgatactaagcaagagcttaatgggtgatattattattactgctgttattatggttctgaaattgtagttctctgggtcagtggctaaaagtggttggaggaagtcttgttaaagtataacaaaatttactatctttcctgtttgcaggaaatctggaaagtatttgccactgattaggaaagctttttttagtataatacatccatcactgaatgggaaagcaggaaggggatctgccaatgatatgtaagaaaatactgtgggttaaaaaattatcttggtgtgaaatacagagttttatgcgttaacttttctctattaattcaggaaattgttttctggaaataaataacatttacagacaattgaaagtattgatagaaccacacagttgtttcaagctatgtatgaccatctattaacattccgggtgataaatttggtcataatttttatttgtcattgaggatgcaccatccaatgagattaccatttaatgattaaatatccaatatgacttattttatgaaatgatatagcatttcctatttagtaaggtaacacggaaacttatctagtataagacaaaaaccaggcccaatatataaaataatacataatacttgctgttaaaagctgagagaatctttcagtactggaaggcattgcctctctaaatttaagccgagaaattgttaccatagcaactcgcctcttatgtagttgtattattttgttcccttcataaaaattgctatgtattatcactctgtaaatagagacgatatgtttaaatgcatataatatctgcttttccttagttgtggaaaagtttataattcaggtgagtgaccatagcagagaatgtcacccaggaacaggaacatagagtgggttcttgacatttgtctggggtacatctgacaacctttacaaattccaaatttgagaatactactgtggcacaccatttttctggaatttcaatgtgcaccaagaggggaggaacataaagctacatgctcatggagatgttgggttcctcattggttgcccttcctgtaccagccagcatcctattctggtggaccagccttgcacagagtttgtcaatcacatttgtatcccagcaacattacacgttacttcgtgacataaacctgtggggttgctcaagaagagaactgaatctgaaaatgcctgagtgacgactagatatggaatttggcagggtactgtttagaatgggatctaatctctgttctgcagatttaaagtgcattaaggttaaagaatttgactaagtcacagagtgtctcagttttttcgtcttcatggtgtagacgttagctgaatggactgtggagcctgactcctagcagtggcatttactagctatgtcaacttggataagatacttggcatttctgtgcctctatttccacctttaaaatgggaattatggggaaggaagtgagagggagagatatgttaaagcagcgatcctcaacctttttggcaccagggactggttttgtggaagacaaattttccttggatggggatggggatggttttgggatgaaactgtttcacttcaactcatcaggcgttagttagattctcataaagagaacataacctggacccctcctatgtgcagttcacaatagggttcacactcccacaagaatctaaagctgcagctgatctgacaggaggtagagctcaggtgggaatgcgggcaatggggagcagctgtgaacatagatgaagcttcactcactcgcccgccccctgctcacctcctgctgtgtggccggttcctaataggccatagacagggactggtccatggccaggaggttggggatccctgtgttaaaggatacaaaattatagctagataggggaaatcagtgctagggttctataccacagtagggtgtctacagttaacaataatatgtgtttcaaatagctagaaggaggatattaaatgctcccaacacagagaaatgatggctgttggagatgctggatatcctaatttccccaatctgatctctatacattgtatgtaataaaacattactatgtaccccatgaatatgtacaattattatttgtcaacttaaaaaatgtcaaaaaccatactaaataaataaaatgggaattataattttaccttatatggctgtagtgcgaaaaccacgagtgaatgcataatgtactcaataaatgttagccatgatcataatgataaattttactctgaccttgaaaaattcccaaagctatggtgacatttttatgaacaggtagcaggggagtgtttgcatgtgatcaagggtgagtataaaagtatgtctttggtatatattcattcatttggtcaattgacattcaagaagtatttattgagtgttaattatctgttaggcactgagaatacaacaggaaaccaggtatatttagtgcctgtcaccagagagattatagtttagaaaggtatatcgaaaaataaatacaagattataaatagtatggttaagttagggaaggtacagggtgctccaggaggacaacgatataaacactaatgtgttttgaaataagatttataactttgctactcatcgtgtgtatcatggaccaagagtacagacatcacttaggagcttgtaaggaatgcagaatctcaggctacgccctgcaccactgaaatagaatctgctttttagcaagatttttaggtgatgtatactgtatgcaattaaagtttgagaagcacagattttaaacagaatgagcaaaaccataagacaattgaagcatttgtaaaattacctcagggctaattaagaaaaaatatttcttgagtacctactatgtgcaaggccttgatgcaaggtggatagagtctcagctgggcaagtgtttgtggattctccatggctcaaggcacatataacagccctaaggaaaataatccatcctgtgtggttcttagctcctgggcctggctcactgaccacacacagctatttgaaaagtctggttttcagagaagactgtattatgtaaaaattaagtcctgttttaataaacttgagacactatcaaaccctgaattatattcaaccttcatggaacgggagcatataatataacacaaggaagaggcttatataatgaaatgtatttaaagtaattggtctgtggaaagttgcatttggaaaccacaaatttagaaggaagaaagtaatacagaaagatatatcttattacttccaaatgcccctatgacttggatgttattgtttcaaatttaggaatgaggatgaggaaactgggacatagagagtttggaaacctgccttgggttacacgagttgggccaggatttgaagtgttgctctgtgagtggctggtttcaggagggaagttcagaatagctgaagtgcatgatgtggatggatgaaggttgttagaggagggaagtggggaactgatgaggaatgaggttggggaactgatgaggaatgaggttggggaactgatgaggaatgaggttggaaaggaaggatgtagaagtcagattccaaagggccttgcaagtctcataaaggagcagcttgaatatgacttaaatggtagccatcctatccaaacttcaaattcctgctttaaagtatttctggagctccttcatcttgcttgatgtagtgaagaatatagtcctggctcagctgccgtgacttaaacatgacaaactgtattccagtagaaactgattttggttgaggaaattattttaccctagagtaaaataatcaggaaaaaaaaacacttccttatatgaacttgtatcttcctgacaaacagcattcattgtctatagttctttttgctgagatacatttattttattttaatctttgggttagataggacacaatggactgtcctattttgtggtaagggtgcctcaccaataatctgttataaaaaataaagtattgcactttgtgaatgtttaatataatttaaaagtaaactcagattcaaaatgttccttatatataaccattatattagaattcttcttttttgagtggaagaggaagaagagttatttttagtatacatactattgtatatggaggtgtttcatgaatgacaatgacatttctcaagtatatcaaggcaaatgatcaattgacaaaaagtgtggtgctctgggagggtggggggactcattaaagaaggaatgagctagtggctacaggaggctacattcttttttttttttttttgacagagtctcctctttcacccaggctggagtgcagtggcgctatctcagtgcagaggctacattcttaatcctggccaatcatcttatactcaaagagccaggaaaaaagagtgtgtgtattagggttctccaaagaaacagtaccaataggagacagatagatagatagacaacataatttactaagggaactgactcacgggattatggaggttcttctgaaataaaatggaagttttgtctttgtgtctgcttgagtacctgctcaggaaccctgaacttagttctaggaatgcaacaaattctaatttttggattgctaactcagggttaaaaagaatcctgtacattcccactttattatcaaccaccttaaatgtggttaattatgtgaaattatggttaaggtgaggggtaaatatggagaaaaagaagggggcttccctgtattcactagacttttatttcgttccagggcttatgacagagcccaagagagtcagagaagctttctacaaattcagctgtcgcattcattttcttacacactagagttgccacttaaaaatactaaaataaaataaaaaattaatgttgaccatctaacaggaatacttgactcagctactaagttacaaatttgcttcatttttggaagacatctagcatctgagaattggacttttcccagaagttcacttggtaacctcaggtaagtcctggttcatcctggagaggatccgaggggaaagcctgatgggacccacggccgccctgagaagaaaggggtgctgtggggtgcgggaggaggaggagctgggaagcaggagcgcccgggactggatctagctggaaagggggcagatgctctcccggaatcagggtaggtaccctctaggaatgggacgttccgagaggggggtgtgtctggaacattggctaggggtccttagaggtgatttctgggaagggaaggtctggggcagggctgtgaggagtcaggaaagaaactgtggagtccgttcctcacccacttcctgagccctaggttccgaggcccccaggtcagggggttcagtggcgcaggagggtccagggcaggagttggtgagtcacctctcaggtccacctgtaaaggaactctgactcagagcatgagggtagcccaagaagcttcgacttcacccagagaaagtctgcccgccgttctgcccctggagcaggaggcaccgcccctctctcacccttagagccggcggccccgcccctttcctcccactggagcctgcggccccgcccccgcccgctcccggagtcagcggccccgcccctctccccagagtgggcggggccgcaattgcctgctcagctttccttgtgacgcctcatatccccctgggtgcgctgttgcctggctgcgcttcctttttctgtcatctttcgcatcgaccaatgggcttggagcatggaggccacgccccccctctgccctagttggccctggttacaccttctctggtcagtctcacagctgcgcggtggcagacaggacttgttccacagtggtaactgggatagagctgatgtggccccaaccccacctcccttcccgccctgccatgtcggaagaaacccgacgagcaaattggcagcagcaaagaaaaaggtacaagcgcctggtggcagcccaacgacccagccccaggtgccgtctgatggcaggaccacggccagagctcatgccactcccgaggctcactgggttgggcccccagctgcctctgggctccctctaccaaagtcttgtcagtgagcccctcccctcaacagcccagaccctgcctggagtgagatttgcttatttaccatgaaacagatcttgggaaactgaacttgacacttgaatcttcctcatatctcaacctaggtgactttgagtgccacagggtaatatggggcatctttctgaagcatcagtttcccttgattctcttgagagagaaaaaacgttcatggacttagggatgacagccccatagatttctaagagtataccaaaattcactctgaaaagaggcttgggttgtcctctttctgttcaattcccagatgtaacagaaaggctgccttctgccatgaggactcattgatgtaagagtttgagaggggctgctgcacttcctacactaacagacatgtgatgatgtgtgactctaaaccacacagtacccagttcctgcctacttagtgtctgtttttctacctctgcctctggtattgggccctggcagctgctgatttgtggcaaaaccccagatcttggagtcagaagacagagttcaagttcaattattgccttttttaagccgtggtatcaatccctctcagtcattaagtcattaagacaacaccttgtacagttgtttgtggcaataaatcagatggcataaaagaaagttctgtaaaaactgtaaaggcagatgtgattgtagggacttctcatgagaattcctgctcttcttttccacagttgagagactatcagtggaggaacagccctggtgttcctacaggagtgaaaaagaaaattaaaaattgcagtaaccccgagacaaccacttctggtggttgccactcacctggagatgtgagtcttggctggccaggctcctggggacagggggcccaagggcagtagagggtacttgttaagattgtggaagaactgttgggtcctggttaagaattctgggtttgaatcctatctctccctctgctagggatatgatgtagggcaaattgcttgagctctttgggcctctcttttcacatctgtaaaataagggtggtattgtttgacttacacttgtgaagcttaaatgagattagttattatttttatgttaatgccaagtacagggcctgccataaacacccaggacacccaggaaatggtagttgctgtttcattttcctcatccccagtctcaagggaaagccaggctaatgggaacagccacttgccatcaggctgtctcttttggagtgaccgaaagggcccaagggtgcgatgaggagagccccaagcactaagattgggagaagatctaacttttgagctcatctttgcctccagcgtgctgggtgaccacagaaaaatcacttcttccccttggcctctttaactcctctgtaagatgacactggataagatcagtgtctttcagacttgttttttagctggagcctcctatgttgaagtgaacccttactcaaaagtctggttttttaaatggaggtggaggtctagtgctctaccagatttatccccacatcctgggcctgaggagagcggtccaatgagagtattcagagcagcattgtcaggtgactccaccctgtgtgactgcaccactcaggggacttttccatctatttgtttctgcccctggcaaggcagcaggcagccatttggaaggcacagcccctggtcttgatctcctccgctcttcttcaacatttcgcttccctgaagccacctcttcctcctcccctgaatctcttgcctctctctaagcctcttctgtctttgtccacctgcccttgttctacccttttggcctcctgtggattctccttcctcccgctgccaagcatagcctgacacccacagtgccaactcagagagggaagagcctcctcacccaagcctctggagtccagaagacaggagctccaggagggccccaccctcacaccctacctttccagatgctctctccagctgtgcatgccgctgaggctcctctggtttgggggatactttgcctctggcttattttatgttgctgccatttcccttctgactgtttatgtctgcttcttcacctgtttgattgattgggtttttttccttcacccacatcttttattatcttggagaaagtgagacatatcttaaaggttagaggtaatttgggaataactttaagagcaggcatatggaatttggggctttttttcttagagacaaagtctcactctctcgcccaggctggagtgtagtggtgtgatctcagctcactgcaacatccacttcacaagttcaagcaattctcctgtctcagcctgctgagtagctgggattacaggcgcccgccaccacacctggctaatttttgtatttttagtagagacagggtttcaccattttggccagtctgatcttgaactcctgagctcaagcggtccacctgcctcagcttcccaaagtgttaacattacaggcatgagccaccatacccagcctgagatctttttaaaattatttaagtttttatttctaaagcaaagtaacttgacagtagagatctttattgaccgagttgtacattgagcctagccctagcccttttaaggggcactgtgtggaacagcctggggtccccagacctaaacttctcactcttcaccatccagttttcaagccggtgtgaagcccctgatgctaaccagcagttatgacaggccatggaggagcgggcacagctggaagcacacctggggcagtgaggctttgcagagggagggatgtggaaggaagatgaccccaggtggctaggagcaggagaggaccagtgacagtccttcctaacttctgcacccattcttgcaggtaatggaggcatgtagacaaatacaactggagagagatacatttgctgagattcttaaaggagagagagccacatggcagcagaggatgaatcagatgtcggagcaggtgagacctgacacttcagcccccactttagatctttctgggcatctgtaaaatgggaggggtggtcatgagtctgggctttgtggaggagagggcagagagggagatggtagcctgtccagccagcagcccccctctccagggccctttccccctgtgctttgtgcagatgcacacactgagggaggagaaggagtgtattatgaatcggttacaggagctggagacaagcttggtggaattgagaaaacagatgagtaagctgaggctggggtgacctgggaggagggctaacatcagagggccatggggggtgggttagaatgtcctagggaggtgggtggatggaaggactttgaggcagaggaaaagaggtatgtgccaggagatgacaagtctggttatctccatgagcctcagtttcccagtcagcaaagagggaggagtgcctattgtcagccacccacacatgtctgtatctgtaagtggcttagaagattggctaccatccaggtgtggggaatcattagcagggaggccaagtttgtggagcctgagaggagctgtggaccaagaggaagattttttttaagattccagaggcccttattgtctgcttttttttcctcagctgaactcccagccctggcacccccagcaaggccctccgaggtggagcagcagctacaagaggaggctgagcacctgagggaggagctggagagtctggcaggacagctccaagcccaggtacaggacaatgagggcttgagttgcctgaaccgggagcaggaggagaggctgctggagctggagcgggcagctgagctctggcggaagcaagtggaggcacagagacaaatcctgtagaccatggagaccacaccgctgtcagccacgtgctctcccagacctgtgaggtcaaggaacagctggccgagctgcagagtggcttcataaagctggtgcacggccccacctggggagccagccctcctccctagccctttgggcctttgttttcccacctgtcaaatggggccgtgtagccctcacgtgaaatggcacttctgagggcacctgtgagccagagccctgctccaatggctgtggggaggtggggatgatttttctaacctgacttcacccttcctggtgccatgggaggcagacaccaagttctgggctctccagctgcaatgaagttagcatcttcttcgcagaggtgccaaggattaaatgagataatacgtggagagaattaggcatgtcggacacttagcagatgatggctggctcctgcttttccaccattctgtggcctacagtttaagtggtgggaagaagagtgtgagatttcatgcagggaaggaggcatggggctctaggcagtctctcaggcctggagcaaggggccacgggcctgggcaggagacacagccctgcagtgccctaggtaccctattcataggcccagaatttgaaagcaggccaccacctgcaggtcttcctgcaggtagagatgaagagccaagaggctcagagtctgcagccgcagcaagaccagtccctgggtcccctgcatcagtacatggccacttgtcagcagctgagctctgagatggaggcgctgcacaggcagttactgctgcagacccagctcatggaccagctgcagcagcaggaagcttagggcaaagcgatggccgagatggcccaccaagagttgcgggggacccaggtgtgggagttgctgagggcgggtcccaagggggacgacctggcagcctctgtgccttcaactctctttccccgccccttaggagcacctggaagctgccagccagagaaccagcagctacaggcccagctgagcctcatggctctccctgaggaaggtacgggagatcactcagaggaagaggagggagcccaggaggaaggggggactgttagcagataggagtgaggagtttagaacagctggtcactatgccgaccgggtttctgcgttaagttcggcatcaaaacggtgacctgggagtagaggggccaccaggttgcctaaggatgggtgaactggcccaagtcagaaatgaagcaggtcagaactcccctgccgggcagtagtggaactgagcttgggcaacatagtgcgactttggttctcaaaaaaaaaataaaaataaattacagctgctcattcccctctggagagggactggcccagggttatacagtgacggttgaggcagaggtgggcccaccctacttcccttgttgggtcgcgtgaggacccctctagctctgtgccctaggaggtagactggacggagggtgggggagaaggaggggcgggggggggaggaggaggaggatgaggatgaggaggagaaggagaaggagaagaagaagaagaagaaggaggagaaggagaaggaggaggaggcgtctcggcccatgaagagcatcctgcaggacctggaaagccaggagtccatggttagcctactccccctgccccacctttgccccctccctctgtggtccctcccagacccgcttatgcttttggtttcctgctttcttatttctctggatcctcacccctttcctgggagccagtggtcagacagataccatttgacctgtgaccaacaggtgcacactctgaggccccaagcgaagggctcctctccacctccctgccccgttggtcctgtatatcccccaagaagaatgcacacctcttgcctgcaggtggcatttttaacatcagctgtagccagtgcagatggggagcaggctcggctccgtgggcagctgaaggagcaaaggctgcgctgccggtgcctggctcacctgctggcctgggcccagaagcagccagaggcagcagccccagccccagggactgggatggattctgtgtgtggggggacccaccgggccctgcagggtgccatggagaaactgcaggtgagtgagtctcttctggcatgggccaagaagggtgtgagcgaggcagttcactgccgagatgtgaccccattcttttggctccagagctgctttatgcagctgatgcaggaaaaggtggacctgaaagagcgggtggaggagctggaacatcgctgcatccagctctctggagagacagacaccatcggtgaggcggaggccagggcacggcagggggagctgcccagtgggtgaagggaacccagcgtctgagccctgtcctctcgcaggagtctacactgccctctctcagccagggggcagcgctgaaggagcagcaccgagaggaggaggagcacatccacaggctagcccaggacaaggaggagatgaaggcagggcgtggagcttctctgcccggcggggggctgcggggagggtgcagcttcaggcatggcagctgaacaccctctcctccaggtgaagctgctggagttgcaggagctggtgttgcggcttgtgggcgacaggactgagggccatggcagattcctggcagctgcccagagccctgctcatgagccagctccaggggccccagccccccagagctcagggctgccgacaagcagggtgatgagtagtgccctcaggcggtttgggcaggcaagagcaagggaggctggcagtgtgctcagagccctcctccctctctccaaagatctttgccaggtgaccctcaccagcagcgtggagcctgcacaaggagaggccggggagggttctcccctcgacaaccccagtgcacagcagatcatgcagctgtttggtgagatgcagaaccctcaggagcgcccaggcttgggcagcatcccctgcattctgttttcccaccaggctgacaaaaaccaccaggtgaagatcaccctcatctgaaagccagttgccttcagcaaagccaggagaaggggggtgggaggctccgcccccccatgtccctcccacccctttgcagtcacccctttacccttaaagtaaatggatttagccatactgcttggcctggcgtatcctgtttccctcactgggtcctggggtttgtgccactgaatgggggccccagaatgtctgagcatgtcgagctgggctgctggggaccttccaggcctgttacctgcatgctgcctggtgacacctgggggattccacaggtggaatggcacccatgggggacagtccggccctaatggccaacaggctcagaagcctgatctctcggtggctgggaaggcagggtgccagcacccaagggcactgactttcatccagcccaggcaacttcagtcccatccccctgtctgcctcacctgcctgtgcctggtagcctgttctgtgccttccgtccagcccaggcaactgcagtcccattcccctgtctacctcacctgcctgtgcctggtggcctgttgcatccctccctccagagtgcaggtgccccacaggctccctctaggctgagctcatggccctgctcctagtggccagaggtggcttccaggatgagccagctaagctccagggtctttccgggaaaagagttccttggaaagcatgtgaacttttcaccgcttccgacaaccatgaaagctctgagccaggtttagatgccgtaggattcaagggggcagcaaggggtccagagctgcagacagctgagggtgaccattggggtctgctcaggcaagatcctggagtaggtgaccacgtccaaggcaaactgtgactaaaaggaagtgctgggttggccagaatagaggaggctgagtgctgagaatccccaggggatctcggagggggcgtggaaagggccataatgggagggcagaggtgagaacagggaatgatgatgtcacagtgctgagcagcggggctggggacggagtaagtggaggtggagggagtagcctgtttaaacctggagctcatccctatgaacatgaactactggcaaaaaaaaatctttttaaaagaaaaacttaataaacttaggggtcagtaggcccttgataggggagaaacaagcctttaaagtgagcgaaacccaggattgagggtacgaggtctgtgctgaatctcctggattcaggattatatcccctgagggcccagccggaaggctggaacagacctgggcacctggaaagctgacatgggaaacaggtagcaggtgagacaaagtgggtccttgatgccaggaggagaagtgagtgctgggccttgcggccttgggtccatcctaggaagtgctggaggttcacacaagagccctgcctggctggggtttctgggagccagaggaggaaagttaggttgggagggagcagagtgggaagcacagctactagcagcctagagacttggagggagccagcagtctcggcttttagccaggaagggacttaggaagtggatagtttcctgggtgggtcatggtttggagaagtctagagactcgggatggtcgctgacctccctaagggatggggagggtgatctcttcacagaaattcatcagcagccctgaggtcagcgatccccatcccatgtcctgacaggtgcctcctgcagcccctccaccgccacttgccaggttctgaccctgcaagcacatgtgtaaacacacacatatgttcctgctttcctccggcagcaccttgcagggttctgagctctttattcccactcctccattttgctccctttcctgccataatttctctgcccgtgaagcctgctcttcttcagcagataggaggaacatgagctaatagggatgtgctgggcccaggctgcaggatcagtccccctgcagtcctgccctggggagtggggctgacagaaggtctcatcgggagatggaagcgcctcctcagcggtgctgtcagtggacatgtggagggtgacggttcacaggtcctctctgtccttcctactcctggcctcctggagggcaaagaacgagcctaacccctcactagaatccctggttctccagagggtgtggcatgtttgtggaaggaataaataaaggaatggccgagagtcctgcagtaggatgccacgggtgggggcacaggtgggttccagtaggaaaacggccagctgtgtcctggtctcagggcctccttcctttgatcagctctcatgcacatgctttcctttccccggttcctcttggcaagtgctgttgtgtcctgggcagcctcctgagtgaaggtgaggaatctccctcccctgagctcatccacatctaccagaaatttgacttcaaggcattctccttccaggcacccagccacgtggtgacagccaccttcccctacaccaccatgctgtccatctgggtggctgcctgccatatccattctgccttggacacctacatcaaggtgatgcacaggcctggagtttgtgtgttggggacagccaggtcccttgggtggagctgagtaggattgcccagagtgggaggaagaggtgatttggggagagcagcactctggggccctcatggaacaggtacctgtggagccaggaagatgggccgaggtgttggcatctctttcagatgcccaagaccttgtgggagccagagcatctcccaagagcatggagagcttgttcatgaacctggtctggttggtttggctctggctttgaccaaagacatgcttagtgctaatcccacactcctggctcagatggaaggacagtccacttttctctcccactgctagaagcctgcaaagcaaggacctgaggctccccgtggctgggcaggccccaggtaatcacgtgttgcccttggccctgcctctgctatgcacctgctccctgagcccagggctggggcagcaatggcaggcccttctcctttacttcctaacctggtcactggccatggtggcagcacacccttcctggaggaaggagagccagccaccaggttgtctgacagaggtctgtgtgtctacagagatttttttaaaacttgcccttttacgcatccctcctcctctaaatgttttgtaaacctggaaaccaggaaaatgacccattggggcttggaagtgactgttgattcattcatttaacttgtttattttctgtgcgccgggtgctataatgggcacaatgtgaatgaaactttggtgcatgaaacaggcatttacaatgaggtggtgaagacaggtaatcaatgtcagacaaaaatgggacatgtgctagagaaggagagggtgagaaaagtcagggaaccgacttaaacagaatgatcagggacaacctctcaggggagatcacctcaaggcagagtcctagaggagcctttggagaagaggtaagaacattctaggcagagctttggtctaaatgcagcaggaagtcactgcagtgttccaaccaggaaaataacacagttggagcagcgtgtgtgcaaggtgggctgtcccattcccaggcaggaaggggctggaccacagaactggggtgaggtagaggtgcttaggaggctgtcatgaatccctgtgtgagtggcagcggcttgggcaggcccagtggctgtggagacgcagacaagggcggagatttacaggcacttttggaacagaactcacagacttcaggtggattggctgttgtggggagaggcagtgagggagtcacagcgggctccacttctctctggcctgggcaggtgggcaagcatgtagtgatgcttttcactgatgtgtgggggaactgagggaggccctggttttggggggaagccaggttattgggctatctcaggggagctgcctgagagacatccaagttaggggtgtggagtgggcaatgggatgtgtggtctggagttcagaaagggctgggctggtggatatgtttggggacatcagcctgctggcagtatttgaccagctgccctgtgcctcctgcctcggtggggccaggtaggccatggacagcctggggcagcaagggctgggcagagggcatggtcagtgtggctggggtcagggaacaggacaggagagtctgtgggagtgggagcttggaacacttggaggatccttgcaactttgttcaccagagcaggctgggaaaagggacagggtgatgggaatggaaatggaagctctcccaaagtgctgggattacaggcgtgaatcaccgtgcctggccttccctctgcctttttcccactgccccatcagggcagaaggcagctgcagtgaggcagtgagcgccctgggactgggtggctgcattcttcatgactgtgctgtgtgtgctgagctgccttttcctggaggagaaggcggagtggacctggctaacctgggctcccttttcctggccataggaactgacatgatgagtgacacgagttctggaagcttggaggtgagccctggtagccgggagacttcatttgctaccgtgtcacctggggagagcggccgcggctgggaggatggtgacacctgcagtgagtgcagctgcagagagtcaggtgccagcggctcctcttttgaggagctggacctggagggtgaggggcccttggaggaaccacggctggaccctgagactgagcccctgggggctaccaagtggccctgagagcccagtaccctgagaagggcaaggagtaacccatgaccagccccctcctgcggggcagggctgcggaaccgagcagactctccagccatcttcctccttcttctgggggcgaggggttcccaggggacgtaactccccctgctctaggcctcttgtgaagccttctcctcactgtcctttaggctcccagggccaaagcagccaaagactgtatcctgcaccagccctgtgggccgacactcctgttgtatctctttttcagactgtcactggagcttccaggacccagaataaagccaatgacttacttgtttcacctggatttgggctgcgtatttgtttgacagtttcacctttgtggggacccctgtatagaccggccaggagtaggaaggagcctcccctccccaggacgaggaaaggagggaccatgccaaatactggggtcggggaggaggggtggtggagatcctccaagtcctgctctgtgacccccagcggccagccgccctccactgcagcactttttcacagaggtggttatatctctaggatatgttccttaaagtgggattgccaggtctaagggtgtatgtgtggccatgaacagggttaagaactctcgccaagctcccctcagtggaagtggttctcatgtatcctcccagcactgagacatgagagctgcaatgctctcgttcctagctttgtattatagaaattttaaattttcatacatagagagaagttgaaaaaaagcaccatgagcacccatgtaccctgcacctagatttaatgattatcagttttcataagccttcttcttttctccctccctttctattatttgagtcatttgtaagtcgaagacatcatgtcattttatctctaagtacttcaacatgcctcctttaaaattaagaatattctgttctagccgcaatatcattattacacttagaaaaagctaacaattccatagaattacctagtattcaggctgaaattcagacttcctgtttgtctcagctgtctttcatagctttggattttgttttgtttttaaatcagaaggaactgctttttagctttattttcctctctctcccacccaaatcactgtctcttactgcaagaaaaagtctgaccagttttaagaatgatgtcttagcgttttatattccttatctcataggattcactttggtatcattttacacattgggggactgccttgtcatggatagacatttcaaataatttttttctttgtgactggaaaaggttgactgggagatgttgttagacatcaaactaacagaatttcagggaccacaggtcaggaattttttaatggaattttctcctctaccctccgctccctgggcattctggttctctgttacctatattttgtctccaggttcccaggtatcttctcgtcagtccacaagcaacgtcagacaagtgtttcttcacccaaagacccccaccctgcagggctgcccaggcccatctctcctgacagcctggagatcatcagtgagcttcagcagtgggcagatgtggctgctgcctgggaatcccatcagagttccccaagtaccaatgctgccctgcctggcccccggcccaccttgtggactgcactgctgttcccgggacagctctcagagctgagcctggactcggtggtcattgcctccatagttccctctgggtgactggcagttctgtggtcataggcacccagtgctggactgaaggggccacaagtggaagttgaccataccatcttctcccaggagtcagcctgctggtggtccagcaagggccatctgccagcccctgtgcagctgcatgaatacaggtgtccagtctctggagggtttgccaagccacctgtctccttacatcataacctcaccaccccttcacctcctaagctggggacaacactctgtttatgggcagtgccccctcttactgccagctacccaatttgctggcaggtgcccacctggtgtttccagtgactactgaccctctgatgccagccagcaggccctgtccattcctcttctaagctacttccatcactgccagcagcccctccttcatgctcagcccttctgtgccagggaaaccacccagctctccacttccattctcacagcgactcctgactgagctgaggatgtttgcaccttttccttcccctgtcgtgccaagcaacctttcatggggcatgtctatctacccaggctacatgtccccatgggcaggctacccagctggtggcctccttccattccaggtgcctctatttcactctcatgaggttgctgaagtggggttcagctccagtgatgatgagaatagggacgatgatgtgatagaggtcactgggaaatagctggggagctcctctgctcttcaattggggtccccaggaggttgcccaccaagctggaaggcaatgatttggacttctccagaataggaaacttggcagaagagaacacaaaggggacaaaggagggtggttggccatggtggcagagctgtgttgctgtttaacaaaagaggcaaaaaaaaaaaaaaaaaaagcccaacagggcagccaacagcgggaaattgaagacccaaagcagggctggagaactgcgcagcctctcccactccctgccttgctcatgctgtctgcttgcttgctcgcccatcaaagtgcaaaagctcacatcccatttctgtctctaggatcattctttccaaagagacctgccttactgagtgatttaacttggcctggggaggggagggaagggaggaagagggaagagcgagtgagagaaggagggtgggcaggggagcaaactgtgatcccaggtgaagttgggtctttttatggggtggaaggaagctgaccaggcttgtgtgtttgtgagtctgtgtgtgttgatgtatgtatgtaacagagcaggagtaaaggtgggaggggagggagggagaaacaaagggggaaactgaaataaatttatctttcttctaatggaaatcagagtttggtcgttcatggcacctattagtgtgaacatcagggtgagcccaggtgaagaaccatggaaattacaagtttccttctggttgggggaagagaaggcccagctaactcaagtccctggttttaagagccacatttgtttgagaatttgggggaaatcatgagagaaaatgggcattaccaatctgcgtctcttaacccccatggctctctgtgagcagcgtggaaggttgtctgtgtgcagaggctgggagggggaggccctggagctgtggctggaaaagacatttttcaccggtgggacctgagcccccagctgcctatcctggtgtctttcctgttcctttccttcccctttagagagctccatgttaatttatttcttatgggcaattacttcttacttgggcttttcatgtgtcttgtttgtttgtgggtggggtgcggggaggttaggggaaaagagagtaggagatagagatgttttcagatatcccagactccatagctactggtgaaaaacaatcctgggtggatggatattgatgagggaaagagtctgtttgaccaaggtttggattaaacaactatatttttgagagattgcttttcagaaagatcaaggaatcctgagactggatagttagtgggaggtgagactcattccacagaaattgaaagttgggatcagagtttacaactgggaagtcgggaagcccagatttggagctgtgtcctcctgggatgatcttagaggctggctgtctatgctgaagagtgaagctgtgggtaggtggttgctgggttgagggacttttgatttcttgttaggaaatgtcttcggatgacccacatgggcctggtgtctgctgcctccatcttcaaaggaccatggagaagccctttctctgtaggagtcataagtttgggttttttcttaaaagaacacattagtcattctgggtctccccttattgccaatgccagggaagaggcatctagtccttaagtacaaacactggctgtcttcctattcctattagcgtccctaccccctctgcatcccccactccccataccccaaggctttaccagatggttctttatgatgaagaaagtctgactttagagctttaccacctcaccttggctccctccttactgggcagatgctggacttgcctcttcgtagcccagaaggcagcttagtcaggtcatccctatactagctcctgcagccctctgaccagcctggttccatcattggagggccatagcagactctggggtaagaatccagaaaaccttctcagcagggaactgaaaccagtcactggaggcatagatttgtgaaattgccagagagcaaatgggtattctgagaggcagcacatggctactggctacccatgttccagagactgggtcttgcttctcctcagcagaggccatcattctgggaggctcacctgactagagaaagctttctcttatatgtgcagtttctattgtgtagaggggtggaggtgggatcatgggaaattggagtgctaccaggtccctggtttttgcttttattaaaaaaacactcacacacaaaaaaaacaaaacaaaaaatgtggggccacgtgcgggaatgcagaggatctgactgaggaatttcccctcgctattgccttccatggaattttttcaagggcctctcaagccccatccatctggtttagccaagttctcagcctggggaatgcagtactacttaatgattcaggtttgccatttgtagtgatgcttgatttccttttcttaatatatttgtagataaaaactgaacagggacaaagtagctatttaagaaaggcaatgaaccatggtgggtcttatcattttctttagattggatatctgtgaagtcctcacccctctgagttatgctttttttcttttcttttctttctttctttctttcttttttttttttttttagagggagtctcgctctgtcaccaggctggagtatagtgacaaaatctaggctcactgcaacctctgattcaggggttcaagcaattctcccacctcagcctcctgagtaactggtactacaggtgtgccccagcacgcccagctaatttttgtatttttagtagagacagggtttcaccatgtcggccaggatggtcttgatctcttgacctcatgatctgcacatctcggcctcccaaagtctgggattacaagcgtaagccaccgcacccggccctgagttatgcttcttaagcgtctatctcatcatctcttgatttagggataattctgtctggtgcttggagacctcttccctaggaattagtgggtggagtctctatatacttgtgattcacagctaaatatgaaatttcccaatccaggaggagacagcaaagagctggggtaaagatgtgcagactggttgaaacacttagccaaacttaagcggcctggatgggaccatcactcccaaagctgtcagcagagaaacgccctctgtgtcaatcaattcaagcctggtattgctctgaaattgagtcctcatcccatgggggaaggtctctgggggcttttcattcctttatactagtgttctggatataacttcctgcttcccactttcttttttgatttctcagaagaccagtgtctccctctgaaccgtggccttctgtgcaccgagctcagtggctcttccccaccaaaactcctaagagaagtcatccctccccaaaaggatccccacaagatgttctggccctctgctgactgctccctcgaatcagcacctcaaggactgtttgagaatgctgtgctctccattggtcaccttcggactccgtttccctgctgccatgtgtattcttctcttctgccctgtgtattccatggtgacccccttaatgtctgttctgtgccactagcttggccctgggccttttatttatacccgagtcttacaacgaagagtgtcctgagcagacagtgtccaccttctttgctcttccgggtcctgagtgtgctcctttcccttttgcaggtctattggacatagtaatccggtgtgctggggaggggtagccaggccggctacagagtctgcaatgcaggggcttggggaggtttgggttctctctgccaccactattgagatgatattcagaagagagaggacctcatactgtgaccagacccaagacccttcctggaagacagctcagtccagctgtgtgtgtgtgtgtgtgtgtgtgtgtgtgtgtgcgtgtgtgtgtgtgtgtgtgagagagagagagagagttatgtgtgtgctgtgctcatgtgcacctgggtgtaaaatgactgttagctggttgtgttactcagggtgggctggggactcactggaagaatcccctcagtctgcccaagacaggttttttccttgtgccctcttcagagaggtcagggaaagagggtccaggtgggcaaaggcggagatgccacaaatgattaatcactaaggccagatggctgccaggaggagtgggggatgatgaggtagcccaagggtccaggcaactggctttggttttccatcttctttcctcaggatgcccctgaggcctgggacctgtgcctggctttgaggagcatctgtggcttggcgatccagctgctggggtgatcatgggcttccctcctctcagcagggccggagttcctggtccagagactgaacaactggctctttctgtgacatatttatttttacttgtgtttcatgtcacttttttgaaaaaaagcaagcagaacaattgttaagtcagtatagctgcctatcggttttccttatttctctttttgtaaaataaaattaaaactccagaaggcagtgttgtttgattgaggaatggtctggacactgggttggctgggtgctagtgaaaggaatagatcttagaacacagtgggctctgcgatagcccttgggtggtgagacaggcaggaacagaaggaagactgctggcagtttctttgttacagtggggttcactgggctttttctgcttttgtttacctgaagagggatgtatttccaggctccaggggaaacagcaagctgacttcagagtggcttgaggctagctggtcctcagccatgacaagtcctgcacggacagccctgaccagactgtgaatggcggggtattgggtgcagtgccttcagagggtgggagatggttgtaagggataattggaaggacagccaagaaaggaatgaggccaatagacccaagttcaggcaagctgatttattgtcagtcctgcctggctacctcttgacaaaagcagagaaggcagccccacttataggctagagcaaggttttataggacatagaactggatcagggtgaaggaaaaagaaaagggggggggtcctttgtgccatgtgtctgaccgcttcctggagatgtttttcttgccagttctcttgtgcaaagtagacgtcttaaccgcatcctgggacagctggcctctggtcaaacagttacaggcaggtttggggtagcgggttttactttttggcctttggggcttagtctatgggagggggaaacagtccagttgggtggaccttagcaatggtgtatctgtaagtggctggtggcagcgacaacattcttacgctgcatgtgtattgttcagttgtcatctgtgttggggaatctagccactggcccacagagagttaaccagagcttgggagtgtgagaggtgggaaagagggaaccatctactccagcttcctgtctaatttcttcaaggggaggggccctggggaaacaattccttggaaatgtacaaaggaggatagagaaagaatctctgtaggaattccttgggcagaggaaggcaagaggacacccaggtcacgtcagggctcatgatagggaaatctgtgctatggggagatgggactgggagtgaagggtgggtgcggcagatggctgggccagcaggtttcctgccacctgttaaaagggggtgggggtcgggtaaagaaagtgccttgcagagtaggctgctgcctcccggtggtcagccgcggccttgcatggatcttgccaagggagtttgcttggcggtgttggaagcggcctgagatgaagctgggcgggctgatggcctgcttcccccgtcaccggcagactctccttccacgaaagacttgctgaagctcctgaggcacatgctgaactgtgatgtgggactctggagttccccaaccacgctaaaggaagtgagcagagaggacaagatgaagaatgggcgcctccttataacggcttcctgggaaaagctcaccacttgatgagaagcagaactgaccagcaggccctgcaggcagaggctgtcagtctctgagccagtgccatggccctctttgtgtcaaaggaaatgcttccaagtgaatagcctgcctgcctagggcacctgagctgagcgtttgaccgtgtcctgggagttcataggtaaaataactgccgcgacctgcactgacccggaccggagtgcctgaaaggggccagctgcctattccgccagtccgcctggagggctgggacaggcttggtcctgtggacgaggttccatctcccctgcctgcggaaggaagaacgtgaagcacagagaaaggaagcgggatgatgactgcccctgtgtgcccagcctgctctttgctagtgcagtagtgggatccacaaggtcaaccaccccatgattgctgactgtttccaccaccagtttcctggtgttcccatctgcgggatcctctcccatcagtactggtcagaataccgaagtagctcttagcctcgacggtcttgtagccaagcttatgaacatcgttgtcaccttccccacctcccaccaaaagtctaggactgtcgcgaggggagggttttatctctgggcccctggcagagtgctttgtggtttatatgtcctcagaaatttgaagggaagagtgaagcgatcatcaaggagcttacacttgacctgggagtcacctaagctatcgctaaccagaaaggtagaccagcctcccccagccaccaccagggcactgagggaggagcctggaagggggcatgcccctgggatgtggactccaggagggcggagccttggtcttattcactgtatccccagcccctagaattgtcctggcagggagtgatcataaatgttggatggatgaatgtgctcacggagcggggaggggtgggtggaggcaggaagcagatatttggatccaccagcttcttccgtgagcccagactgggcttaagcttcctcagctatgccttgcttggttcccaagtcttttgcgaagccataatgagagaaagtggcaggactaacggtggtacaaatgccagaggcggatactgctgtgccgtgtctccctagcctgtgcaaacgctcctcctcagcctcagctccctggccccagcctggccctctcctgtggacccccgggctgggctgtcactgaggtgctccggctgacccagatcccctgggtgttgctaaatcaacctcggcaactgtagagtttgctgaaggcgggaaggtagtccgagggttccgccccagccggctccagggtcaggcgcacgcccgtggccatggagacggggagaggaggcctcggccctcccggtccagcgcattcagccaaggctacggccacagccacgtctagccagagagggggcggcggatccgtgtgcgctgcgggcagtggtggaggcggggccgggccggaggcggggccgggccggaggcagggcgtccccactgcagcgtgggtctgggacaccagtccacccctgcgcgacctcagggcccccacatcctgaggggaccggctgctcttggcctctcgcctcgcccatcgctggccccggccgcgtcccagggcctggatgcgaacttggggcagccctcacccttctgggcagtttggaaggtgagaggaagagagaggtggttactaaattcccttcaggggacaggaagtgctcagctgagatggcagatcagagtgagggctggtcattcccaaggcaagtggggggcctagatgctaagagttttgcagctttgggctcagagacgtccaacaaagattaaattcttgagtctttctggaagccagtcaccagagaggagagagaaagcggaaatggggtcctggagtccgagtgtctgggttcatgttgcctgcattttggtccacatggctctgtttaatacctgtgtgaccttgtgcaagtctcttaacctctaaccacttgcacccttagccatacctatcttgtcggattgctttgaggatgaatgaagcagctgtgtttcaacacttagtgcctggtgtatagtaagtgctcggtagaagatttctcatcattatcatcaaagacaacaggaatgaaactaactggagacaagatgagtaggacaggcagaaaagagagagagatactgatgggtaggagcatagatggctgagaccagtgggcagcacctccatgtcctgacactaaaagtttagaaatttactttgcctctgccgggtgcgatggctcacgcctgtaatcccagcactttgggaagctgaggcgggtggatcacctgaggtcaggagttcaagaccagcttggctaacatggtgaaactcgtctctactaaaaatacaaaaattagccaggcgtggtggcgggtgcctgtagtcccagctactcaggagactgaggcaggagaatcgcttgaacctgggaggtggaagttgcagtgagccaagatcatgccactgcactccagccttagcaactagagcaaaactccatctcaaaaaaaaaaaaaaaaggcagaaagaaaagaaatttactttgcctctttgtgagcaaatactgtgtgttcatcgactccaaaaataatttttttagtgtaaaatcaacacccagaacccacagggaacaaataattccacagagctaagttttccacaaagctgcagtgtggccttttcagcttcaaaaccttttaaatgttaaatattacttttaaataattggggtgggaatgtacccccagtgggtcacatgcttcccttcctctttaaacagttttctctgtgctataattcccccctctccaggcaactcaggtcaaggcctctgtgtaagagggttaggcctctggccccgagctgcctggagacctaggcagtctgcccggaatagctcacacaatggttctgtgttgtgttcctgggcccgctcttgaacagcttcccttcctctatgcgtagctgttacttcttcctgttgtgagactccccttctggcagccttttcctcttactcttcactgtttcttctatgggctggaaaattgagatgaagcttgttaacatgggtgattcaagtctgggaagcttaatgctgaactttgttctagctgctcaggccattttgctgtggtcttccctctggttctggatgggtgagcttgctggagagcaaggtccctgcaggtcagatgtacttagcaaagaagagtttcctaagaaattctctttcctacacacatttccccctggggggatttttttccctctgggttccctgtttgttgataggtgtttggaccctggtattcatctgtcctccctctggcagtagtccctgaggtttcgggaggctgggctggcagtgtggctctgctgtgggaaggaagaggtattgtggaggaaaggcaggctggctggcatctggtatatcttgggggagacttgtccaggccaggagtatgtccctggatgactcactcctgtgcccctctgtgactcagtttcccccggtgtgaccagggcttccagctgacaggtagagctgttctgagatcctcacctactgtgtttaagaaataaagaggcttgtggcttcagtcatcctttatggctctcttctaggtcactacgtgctctggcccctccacctcctgggtcaaagcacccaaggcagggctgaggaggttgggccagaaccggttggcgggcaggtgggcacattgtcagagatggctatcagcctcctctcccttctttctctgttgcagctgccttggggtgcggtgcaggggtccagagccatttcggacctgttactactgggcctcacaggtggcctgactctgttactgctcctgacactgctggcctttgccgggtactcagggctgttggctggggtggcagtgagtgccggctcaccccccatccctacaagttccatgtggagccctatggtgaggctgggtggcttttcaccagagctgcagcatctcccccaagctctgctccatcgctgtccactaggacaaccccacatggtaaggagcctccatggggttctgccccacggatggacctagtgggccagggcttctttggggagggtagttttggttgctgaggaaagggtggaaaaatcctcaagctggccctgcaggcccctcctctgtgagcttgaagcacctttcagatttagcctggacttctgctccaggaatccatttgcaggctttctacttgcctgggtctggttccccttgaccatggctactcatggattttcaaatgcagtggatgataccactatgagtccctagcttctgccaggacttcagtcccctgctgcctcttcttgtcatccctctttccatctccatttagggccagtcctgtcagcccaagccattcagattctggccactctctggggttacatcatgctgtttctgtgctttccacccctcagctctcctgctgtagttgtgggctcttgagggctaagacggcagggttggggggcaccagaatggctgaagaggtaagattccatgccccatacccaaggtatatggcatttccttagacctcaagctgcctagttgggagagggcctgggggtctagtggaaccagatgagcagctcagaatgtccagaacactggagtcatagatgaacccagcatcattagcaccctatgggcatcaagctgttcttacaacctatggtgagtaaagcttgccaatgtagcctcctgctatgttatagggtagcgctgccacagctggatggggctggcagttctgccaagggttcttcagcctctaatactgagccatgccaaaccaagcactaggaatccccagttctgactttttttgcctggaaagctcaagtggacaagccctacggcctacccaatgtctgctgacccggcacttagttgaaacagggtgtgctggttccctctctgccccaggttctgctctacacctacactttggagatgaatcagacctagccctgccctcatacaatgggataatttaggaatcagagagaccgaggggttgaggaggatttattattattattattattatttaggtgaactggcccagtcagattaacatccaaaaaagactgagccccaaacaaagagtcaggttaccttttaagcattttgtggggcagggggagatctgtgcagagggaagcatattacagaagcgagaaacaaaaacagttctttaattgagacatgcattacatcatttcttacttttcaaggaaaaacatgttttacgacttgagtttatctgtctagtgaccttgcagctgcacagctagagaaacagggtcttcacaatgcctgggaaagggagagataaggctcactagccacagactgaaaaacagacagttgatttttaaaggagtccacctctttctcttcctcagggggaattgggttttctaacatacaactgagtttttgctgacacattctttaatttcttttaattcctgttctagtataagaccaagctgtgcccccaacctccttggtcacgtgttgtcaggacctcctgaggctgtgtcacaggtgtgtcctcaactttggcaaaataaactttctaaattgagacctgtctcagatacttttgaattcacactactaatttcaggtagaattttaaattcttaacatagaaacaaataaggccaggtgtggtggctcacgcctgtaatcccagcactttgggaggccgaggggggtggatcacgaggtcaggagtttgagatcagcctggccaacatggtgaaaccctgtctctactaaagataaaaaaaaaattagccgggcgtggtggcacatacctgtaatcccagctactcaggagactgaggcgggagaatctcttgaacccgggaggcggaggttacagtgggctgagatcgcaccattgcactccaacctgtgcgacagggcgatactccgcctcaaaaaaaaaaaaaaaaaaaaagaaaaaagaaaaaaaagaaacgaactagttaaactgagaaaaattaataaaagtatgctcaaatttactgacagaattatgggtaaatctaattagattctatccattttaagtaaataagaaaaaaaattacgaaggagcctttacctttgggaaatgaaaaaaccgcttttgaccagttgttccccacaggtacacaccccagttcccagccaagccaggacggcctgtcccggtgcctggagggcagggcccctgcggtctggggttggggtttgtgttctggctccgcgcggtggtctggaccgcgcccgccctgcctgggctcccagccggaaggacggagcggttgcggggcgggcgggctgcgagccacacagggtgcgggcggggcgggcggggctggggtgtcgggggctcggattcggagccagctctgccgtggggcgggctggggcaggcttcccgctctgggaaatttgcccctgctctccctgccagttgcggtcgtgggcggcctcgccttggagccctggccacggagccgcacggggcggtagagaggctggtggggagggaccagcgggcggtggaggggcggccctgcaggcgacgcggggactggaaagggcgcctgggtgggaagaggcgctggcgggtgatcgtccccaccgggccagtccccgggatctgctgccgcccctctccgaaattcacagccagagcgggcgcactggtgtgtgtggcgcctggagcgctagggtccccacccaagtgcgaggcccccgcggggagcccagcccaggggcgtccacagtccaggccccagaccccaggtcctggctagattcgccaaagtcagaggctggaatctggagggcggatgtgagggtgccagctaagcccagcccctgcccggcggtggccagcataacgcggtgacactctctggagcccccactgccaccactctgctgtcaagcccgctgggctaagggatccgtctgcccctagaggtgcgcacccaacgccaggcagagggagctggcgtggggctgctggcggtcaatgtcacccgagatgaggaggatcttctaggaggggccccggggccacagaacgagaggggagtgtgcgctgagcccaccttgcaaagacgctctggtccccgaggggcggcaccttcggcctccagccaagtcgccgagcgctcccagtgctgcctgcccggcacctgcactccagactccaggctgccaaccaaagaggaagcccgccccctgggaacaggccactctcagcttgggcgagggaagcacagacacccccatccctagcctggcagccacacacagggaggccatcacctgacgattgcggggggcctgagttattgacaggtgaatatgctgggaatgaagactcctgggcctgggagggaggggcggtggtgtggagggcggtgaatgcctggacctctgggtctccaggctgccagcggcctgaccaggctcccggtgtcctcctccaacctcagtttccttacctgtcccagaggagaaatatggcagggctgtttcggtgattaggccggataatcctggtaaaatttattagcctgcctggtctggatattattttttctgactttgttaagaaactttgctgcccaatgtctactcttggaaagtgagttggggaggcaggaagtcaggactctcacccttggcttcagagtcccttccaggtgccccctccctttaggctcaatgaaagcacagagctggcaaaattcccttacccaagacagctgtagagtccagaatcagaagatcttgttttctgacccaaggaccgtttcttaccccaaaatcgaaatctctttgagtggtcagcttcagacaggagtctgaatttgattgtttttctctagggttaacccaaggcccttatgataagcgttgcttcatccccattccaccccttttcctgccctaatgcattgggggtccttaaccgtagtgacctggaattgggagcaagtttccccaggcggggcatattggcctcctcaacaggctggcctggccttggcctgataaacatcagtcctggggcaaaagacccagggcagggagatctcccccccacccccactttcacatgctgcagtcatttaatgggctgtggtgacctatcagggtcccctagcctgcaggatggaatttaactttttgccatagagggggaaactgaggcacaaagctagtgagtgaaaaaatcagaaagactctgtgactgggaaacactccccaggaccaaggtccctacaggactcagccccttttgggttgtgccagtggttggcatgtgcaccctggttgtcgtctgtacctttctggggctgagggtggggtgggtgttctggcaggacaaggtctgtgacccacgggatagagagacattgccctctttccctggccttgggcagagcaagagttctgttctctaatgtatgtaaggaccagtgcctgtgtgagtggaggtgggactccttttttcttgattaaataaaacccttcctggggctgcttaggggattctggggcttgtgtacctgacagttgggtgtggcatctgggtactcagcttgtctgtgccttgctgtcacttctccagggacagccacacacttctctcttagtccccacacatgcccagtcccttactttttcgcctgggatccccctgcctgaatctctcaacccagccactgctaggtctccccagggaccctgtaatccccgggatgggattgccggaggcggtgaccctgctgcctacctctgtctgaagttagggtccctggcctctgcctgcacctagtggacagggagggtgaactggtcaaggataggctcttggcctagcacagggcctttctctgcacctcaccatatagtggtggaggctccaatcatggctggcctgggaattgctctgcattgtgtctcagattgcaggagataagcagatccgaggagaggagcacatcctgaaagagaatctgaattttccaactcagctgaaccctcggcccctgcccttgaacacacattctggttttcttaccaagtccctgcttgttcctgcccacctggccttcccaggcaggtgattggtgtttctgccccatgtgtgctttggctgggagggtcactggtgggccaccattcagaaggcaattaaatcggcctcattatctggggtgttacacgaagttcttggtctcacagccaatgaaatcaagggtgcagacactccaaaggtgaggttagagaagaatttaataagtgaaaggcagaaagctttctggcacagagaggacccccaggaaaaagagttgcagttttaaagtgaaaagcccaagggattttataaacaagctggtcgggagaggtggttcatttacataacgtgtgaaaaaccagtcaggactaggtgtgtcattgcgtcctttgcataaggtgaaaacttctgacagtccccactccacactccaacattttttttgttttgagacggagtcttgctctgtcgccaagctggagtgcagtggtgtgatctcagcttactgcaacctctgcctcccgggttcaagagattctcctgccttagcctcccaagtagctgggactacaggcatgctcctgagtagctgggactacaggagtgctcccgagtagctgggactataggcgtgcaccaccacgcccagctaatttttgtatttttagtagagacggggtttcaccatgttggccacggtggtctcgatctcttgacctcgtgatccactgctttggcctcccaaagtgctgggattacaggcatgagccactgcgcccggccccactccaacctttctagtgtgcctgcaggctccttagcgtgagttactccatgttgcttatctcttcctaccatgcgtgtgtaagtgtgtgtgtaaaaagaagtgggtggcagaaccctccaaggtaaacgtgcctgattcagagtagctcttttttatcagtgctgttgcaggcactccccttgtgcaagcctccttgtctgaatattttcaaaaagagagagaaatttgctcactggggtcctccgtaggtcagtgaaacttgctgatcacatagcagttcctttctgtgttagaacttgcctccattatctgcgtttccagcctgatcttttgagctctctttgctaaaacagaaatgacctccgggattgcttttccttataagagaagctgctttttgttagaagggaattctaccaaggactctcaccctatctgtctagttgatttctttctctcccctctctaagtaccatctggtagtgggcagcactgagtcattgtggtctctccacagcctgctgggctctctgcatccccccaagggtcaccattatccactcttggagggcagcgcagagctctgggaggcgcctctttctagcttccgtccatactctcatgtgtgtgtcagggtcctcctctgagagattggggtatctctgcaggcagatggcagtgaggtcaccatggggggggctacctcccccctgtcttgggcccaggtcttgggcccttctgagagacactggcccagccaccccatgaatcctcatggggaggaaggcagctcccatcgcagccttcaggaagaggaaaaactagttgggctgtgagggaggggtggccgcagtgctaaacaccaggaagaagaggaggccgggcctgcaaaacttcattcttagtaggtgcccaccaggtcctactaaggtccactgcacagtggcaaaaggtctcagaatctcataaatggacaccacccaactgccttctaggctcttggcactgtggacatctgatttctcccttctggtaaactgatcccaaggcctgttctggctccttcaaccagctgggatgcccactgggtcctccctgctgggcttgccctgttgtgcctccttgagagggtgagaacttccctggaagattccctcattccctgaagtcccccaagccaggtcgaagcaccctggacttctcagcagcagcagcagcttggaggaaggagacagaggggaggagacacacagcccagctctgacaataaccaggatgtggggggcatggtgttgatgctcctgggagccttttttagcccaggaaagagacctcaaaaggccagcactctccctacacaggagaagaaactgaggcttgcaggtagacagaaggagcctttgaaatggggttgacccagataggcctccgtctcccacttctcttatggccttcacatgccaggcccctgactggactcagacccagtagataagaagctgctggccaatccaaccacccaactcattcacttcaactgtccagacaccagccatcctacttcctccatttcctggatgaaaaactacaagaggtttcataaaaagcatcacatcaggacatcaaggttggcctggtggcaagggtgtgacccttggacttgtgagcaagtggtggtggggtctaaggtagggggctctgcagggcaggacctgtgatccagtcctctcacctgagcatccacccacagttgcgacattagccgtggagcctggttatggagagcgtggtggagaataagttcggcagcatcctgcagatggacatgatggacatgctgggtgagggctgcaggcaggctcaggcagtgaagaagccggccagccctcatgtgcccctgcagagtgctctcctcactggccattctgcatacatggctgctggtcaaccagactgtggtgctgggcggtgaggtgaagctccgctgtgaggtgtgcagggacttagcatttggaggcgaacagcagcaaggtgggcaccaatgtcatgccctcctcaccatgctcaaggtgggtgctgctgccagctgggtgcaagtggtaggcaggctgtggggggggctccacttcactgaaatctaccaccattatagaagttttagagtagcctgcaaaagataaatttatggcacagccagaagacaaaatcatctgccgtgagcagttctggatatgaacttgctgctggttcataccatcttctacgaaccatagtctaaacttagatgcagttttttgtttttttttttccgagatagggtcttgatctgtagccaggcttgtgtgcaatggggtgatcttggctcactgcaacctctgcctcccaggttcaagcgattctcctgcctcagcctcctgagtagctgagattacaggcacacgctactatgcccggctaatttttgtattttcaatatagatggggtttcaccatgttgaccaggctggtcttgaactcctgacctcaggtgatctacccacctcggcctcccaaaatgctgggattacaggcgtgagccaccacgcccaaccaaagcagtttctcttaaagtaacaatatacgtgtcagtcaataacagtgggaatgactcctgtgactactgtctctcgtaatcctttcaaaaacatttgcttctccctttgcaaccatatgctctatgaattcacacactgagtaaagaactctttggtgagcttatcatgaatctcacatactaaacaaacataatactgtattaagatctcctataaaatttgagcaaagtctatttgaataatagtagatcagaaatgaaagaattatgttgagctttctggaagatgtagaattagttattttgtgtttatgagttctctattaacctacatttgttacttaggaatatatatattttatagaattgggtgcgatggctcatgcctgtaatctcagcactttggaaggccgaggcagatggatcacttgaggtcagaagtttgtgatcagcatgggcaacatgataaaaccccatctcgactaaaaatacaaacattagctgagcgtggtggcacatgcctttaatcccagctattcaggaggctgagatgtgagaatcacttgaacctaagaggcagaggttgccctgagctgagatgcaccactgcagttcagcctgggcaacagaaagagactctgtctaaaaagaagaagaagaaaacaaaaggttaggaatatatatgtttcttattctgtgaagtttaaacggatgcacttgctcaaaaaatgaataaattttactccaaatttttgcattcttcaatgcatcttgtctacaataattattactgtcatgtcctagtggtgattttctattttgcattatctatctacattgattagtacttggaattttttaaagaagtctcttttctcctatgttttttctttttaaaattattattatttttttgagacagagtctcactctgtcgcccaggctggagtgcagtggcgtgattttcaagcaattcttctatctcagcctgacctcctgttggccaggctggtcttgaacgcctgacctcaagtgatccacctgctttggcctcccaaagtgctgggattacaggtgtgagccaccatgcccggccattttgggtaaaatttaaaggagaaacaatgtatttatgcagactcaaaggatctgcctccaaatatttataaataccattttatcttaattttttatgactgtttaaaaaaattataacagtactgtgagatatataatgtacagatgtaaaatttatgaataatataaagaattaaaaaagtaattaaaactctccaacagcaagttcttcacattttagctttattaaaatagtacagtgttaactttaagtagattgtaatatgttaaagatgtatatggtaatccctgaagaaaccactaaataatgtaaagaggtgtcacttaaatgttgataaatgaattaaattaaatttcaaaaagtatttgtacaaggatgtttatagaccttttagtcataatagcttaaagcagaaaacaacccaaatgtccgtatcttggaagatgaataaacaaattgtaactcattcatgcaagagaagactactcagccacagaaagaaacaaactactgaagcacacaccctggatgaatctcataaacctgctgagacaatcttgaaataaaataatacatattgaatgatgtcaggcaaaatgaaccaatggttttaaaaaaaaaacacaccaacaaatagccttcattgacaataaaatcatctgggaaaaaaagcatgaggaaattatttgagaataataataatattctatcattctattctagattccatcaatagaataaaaaaattctatccattcttaaaaaatacgaagactatatatgagtatatttacatgtcaaaaatttttaggatttgtgcctttcaatgtttgtatatttgacctcacaacaaacaaaagtgaaaaaaataatggagggtggacaatgtgttgaccagaaatgactgaagtagagagctataggtgaaacaagaatgagacatgattaatagttctcgaggcttcatggcaggtctattgaatttttgttgttgttgttgtcattgtttttcatatgtttaaatttttatataataaaacacttaaataaaaacacaaaattgatccacaatgttaactcttaagattatggttattgtctaagaagaaaaaagaaagtgattgttggggcatgaatgaggttagttttattttattttattttatttattttgagatagggtcttgctctgtcagccaggctagagtccaggggtgcaatctcggcttactgcaacctccacgcacgccaggactcaagtaattgtcccacctcagcctctgcagaggctgggaccacaggtttgcaccaccatgcctggttcttttttgttgttttttttttggagggagaatctcaccatgtttcccaggctgatctccaactcctgagctcaagcaatccacccacattggcatcccaaagtgctaggattacagacacgagccacagcacccaacctagtttcattttctgattacagaagtgtatttctttttaacaatgcattcagctttacataaatgaatgctttgtgcatacatttctgtataaatgttatatatcaataaaaaattatatagtactttttttgttgttgtttgttttttgggtttttttttttgttttttttttgagacagagttttgctcttgttgcccaggctggagtataatggcgtgatttcagctcaccgcaacctccgcctcccatgttcaagcgattctccttgcctcagcctcccaagtacctgggattacaggcatgcaccaccacgcctgactaattttgtatttttagcggagacagggtttctccatgttagtcagggtggtctcgaactcccgacttcaggtgatctgcctgcctcggcctcccaaagtgctgggattacaggcatgagccatcgcgcctggcccatagtacatatttgaacaaaatgctaacttagtatctcagaataatggcaacatttttttgtttgttttatggtggaacacacacactcagggcataattatacagcttctaatattccaaaaagagtattcaagccctttttgtttgtttgtttgagacagaatctcgctctgctctgtcgcccaggctggagtgcagtggcacgatcttggctcactgcaacctccacctcccgggttcaagcgattctcctgcctcagcttcccgagcagctgggactacaggcacgtgccaccatgcccggctaactttttttgtatttttagtagagacgggggttcatcgtgttaggcaggatggtctcaatctcctgatctcatgatccgcctgccttggcctcccaaagtgctgggattacaggcgttaggcaccgtgcccagccaagccttaactcctgaatgagaccatacgtctttttattttagccccaattcggtacatggcatgtttttaattttaggggaatgcaacctttattctagaaaatttttccctcacagtaacgatcaccaatgtcagggcacctacattggccaatgtcagggccttgtgtgcactcagtatatatacaactgggttggttcaggaacaaaaccaatagcgacgttggttgtgcatagaacaataatttggtaatattggtaagacaaagccatgacttagcggcaaacattttttcattcatttgagaaaaaatttgcaactagtcacctaaaagtactggtttacagcactggcatttgaccttggctgcgctctgtcatcacctagagatatttacactattgcccaggttccattgcaggaattctgatttaattggtatgtggcaacttgtgtttgggggattttaaaagacctccgaagtgatttttacatgcagactcgggtgaaaacaattggttcagggtgagggatgtattcactgtgtgtgatttccaggtgtgcttctggagctttgccccatggctgcttctgactttgaaatcttcaacagcagctctgccattgtaaaaatcaaaatgcaggccaggcagggtggctcacacctataatctcagcactttgggaggccgaggcgagtggatcacctgaggttaggagtttgagaccagcctggcaaacatggcaaaaccccatctctactaaaaattgaaaaatcagctgggcatggtggtgcacgcctgtattctcagctactggagaggctgagacaccagaatctcttgaagccaggaggctgaggttgcagtgagccgagatcacaccactgcatttcagcgtgggaaacaaagtgagaccatgtcttaaaaaaaaaaaaaaatcaaaagacaacttcaagatgtactcaaatattttgctaaattgcagcagaatgaaatgtcttccggctggggtcggtggctcacgcctgtaatcccagcactttaggaagctaaggaggatggatcacctgaggtcaggagttcaagaccagcctgggcaagatggcgaaaccccgcttctactaaaaatacaaaaaaattagccgggcgcggtggcaggcgcctgtaatcccagctactcgggaggctggggcaggagaatcgcttgaacccgggggcggaggtcgcagcgagctgagatcgcgccactgcgctccagcctgggcgacagagtgagactctgtctcacacacaaaaaagcctaaatttaaaaataattattctattcttttcatgtgtgagcagccatatagtatattatttacaaatatatgagaccttacacacaacgttaaaggcaaacaccttctgcggtgtgcttggctcagctcaggcaggaagccctgcctgaaaaggctgcaccttcggctgtcactctgtcctcattcggcccagcgtttggttacatcttctgtcactcagggcctgagggcggggggggggggggtcttaaacgttatccattcagcgacgctggcctgggaactgtccaatcaggcacgcagctggagcggaaagggcggcttccgggatgtggcggggtctttgtctctcgctgcagtcggagtatggtctagtgttcgctgttctgcgtcctctggtcctagaggcccatcctctgtggccctgtgacctgcaggtattgggagatccacagctaagacgctaggaccccctggaagcctagaaacggtgagagtgccgggtccgacatcccgagagaggggaaggggctggttggaaccggtggcaagaggctgtggcgggactcaggcctccccgcagtcggctccacaatctgcgccccaagttcgccttgcccagcccagcctcagtccccttcagccatcagattggcggctgcgctggcagccggacccccgggcgtcctgtctcttccctgcgcagtgacggtgccctggcctggagccctctctgggcagctctgcacccgcagcgtcgtgtctctcccagattgtgcagggaccacgggagggtggtcaggggagaatcctgactcggggtgcgggttcacgaatgggaagagctttggtttggtttatggggttcctagttcctcttttcttctattaaaaatttatgggagttatcgcgaaaatacttaaaaatttaagcaaggagtggttcaaaagttatagagcacccagctgtgggttgtagtttgtggtcggtccatgggaggatcttgaaggaaagatgcagatgaaaatacccaaattcaataatcggttaggtatatttacgtagtttcttaattttcaccttgagcctacaaatttcctggttgtgtaatcagagcttacttggcagtttatcgttagttaagcctgaattttgtttcccccaatgtagtaatttctaaaaaaaaaaaaatgcatttgagtttgattttttaaaattaggaatccaaagattagagccacctcagtctatttgccgccacatggggctgattttccctggcatttttcacataggtcccaagcaggttctcaagtcaaccccccacaccccatttctccagcttaactctggcttgcagtaaaatactgaattttcagttccttctgaaaatctcaaatgccaacttcttttccctaatttacattattatttgtcctttagtgtacatttttcatactgtattttaattaatcattttttgacaaagcattagatggcatatttaaaaagatatgttttctgtttgtaaatatttcccatgagaagaaagcaaggaatatcccgatagtgaattgtaaaaaatctctgtgcctctttttcttttgtcttccctaggcataaagatcttatgagaatgttttagtgtcaagatgtttttattttgcaaacgttatggggtgatttgtgcttagcaaccctgtcgtttattcttggtcctggctttcagtactgtctctgaataaaccaagataaccgctatggcgatgtctgctagagtatctagtgaatatcagctcctaaagtcattttctttcgtaggacaacctgagatatggagtgtagcctctcaagtggataccctggggaaaagatgaatctcttttaacttttatttttggttcaggggtacacatgcaggtttgttatacagctaaaattgtgtcatgggggtttggtgtgcagattattttgtcactgaggtactaagcatagcaccaaacaggtactttttctgatcctctttgtcctcccattctccaacctcaactaggcctcactgtctgttgttccctctttgtgtttacgtgttcttattattcagctcttacttaaatatttttttttttttgagatggagtttcgctcttgttgcccaggctggagtgcaatggcgcgatctcggctcacggcaacctccgcctcccaggttctagtgattctcctgcctcaccctcccaagtagctgggattacaggcatgcgccaccacttccagctaattttgtatttttagtagagatggggtttctccatgttggtcaggctggtcttgaactcccaacctcaggtgatctgcccgcctcggcccaaagtgttgggattacaggcatgagccaccgcgcccagcctcagctattacttagaaacaacatgcatttggttttctgctgctacgttagttttctaagaatagtggtctccagcttcatctatgttgctctatgttgcttcaaaggacatgatcttctgtgtgtgtgtgtgtgtgtgtgtgtgtgtgtttgtgtgtgtgcgtgtgtgtatgtgtgttttaacggccacacagtattccgtgatatttatctaccatattttatttatttatttttattttattattttttttttgagatggagttttgctcctattgcccaggctggagggcaatggcacgatcttggctcactgcaacctctgcctcccggttcaagcaattctcctgcctcagcctcccaagtagctgggattacaggcatgcgccaccacgcccagctaatttttgtatttttagtagagacggggtttcaccatgttggccaggctggtcttgaactcctgacctcaagtgatctgcctgcctcggcctcccaaagtgctgggattacaggtgtgagccaccacaccctgaccccatgttttatttttagtaaacctttttttttttttttttgagacggagtctagctctgttgcccaggctgaagtgaagtggtgcagtttgactcactgcaatctctgcctcctgggttcaagcaattttcttgcctcagcctcccaagtagctgggattacaggctcttgccaccacgcccgggtaattttttgtgtttttatttatttatttttatttttttagtagagatggggtttcaccatgttggtcaggctggtctcgaattcctgaccttgtgatctgcctgtcttggtctcccaaagtgctgggattacaggcgtgagccattgcacccggcctaaaccttttattttattttattttatttttgaagacagggtctcactctgttgtccagactggagtgcagtggcatgatctcagcttactgcagccttaacctcccaggctcaagcaatcctcttctactttagccccccaagtagctgggactacaggcacacaccaccaggcctggctaatttttttggtattttttgtagagacagggtcttgacatgttgccctgggtggcctcaaacttttgagctcaggcaatttacctgcctcagcctcccaaaatgctgagattacaggtgtgagccaccatgcccagccataccatattttctttatccagtatacaattgataagcatttaggttgattccatgtctttgctttcatgaatgacagggactgcaatgaacatacgtatgtctttataatagaataatttatattttactggttatatgcccaattatgaggttgctgggtcaaaaggtaattctgtttttagttctgtgaggaatcgtcacactactttttatagtggttgaataatttacactcccatgggtagtgtataagcattcctgtttctctgtaaccttgccagcatctgttatgttttgactttctaatactagccattctcactggatgagatgatatttcattgtggtttttctttgaatttccctaatgattagtgatgagcattttttttatgctcgttaaccacatgtatgtcttcttcgaagaaaacacccttttcatgttttttgtctactttttaggtcttttttttcctgtaacttgtttaagtttcttataaattatgggtattggacctttgtcaaaagcatagtttgcaaatattttcttttattctgtgtgttttttgtttactgtattgatggtttcctttgctgtgaagaagctttttagcttaattagcttcaatttgtcaattactgcttttgttgcaattgcttttggtatctttattttaaaatttttgccggcttctatttctagaatggtaattcctaagttatctcatgcattttttaaaataatttgaaattttacatttaaatctgtaatttatcttgagttgatttttgtatgtggtgtaatgaaagggtccagtttcaatcttctacatagtcctagctagttattccagtaccatttattaaatagggatttctttccagattcctgttgttagctttgccaaagctaacaaccagatggttgtaggtgtgttgtattatgggctctctattctgttgtattggtctatgagtttgtttttgtaccagtaccatgttgctttgtttactgtagccctgtagtatagtttgaattcaggtaatgtaatgacttcagctttgttctttttgcttatgattgccttggctatttgggcccttttttggttccatataaatttaaaaatttttttgttttgttttttagctctgttaagaaatatttttggtagtttgataaaaatagcattaaatctgtaatttctttggcaggatgactattttaataatattgatctttttttgtttgtttgtttgtttgagatggagtcttgctctgtcgcccaagctggagtgcagtggtgcgatttcggctcactgcaacctctgcctcccgggttcaagcaattctctccctcagcctcccgagtagctgagattacagatgcctgccaccacgcctggctaatttttgtatttttagtagagatggggtttcaccgtgttggccaggctggtcttcaactcctgacctcgtgatccacctgcctcagcctcccaaagtgctgggactacaggcgtgagccactgcgcctggccaatattgatcttctttatccatgagcacaaaatggttttccatttgtttgtgtcatctctgacttcaagcagtgttttcacagtgttgtcataaagatctttcacctccctggttagctgtatttctagatattttattctctttgtagtgattgtgaaggggttctgtttttgatttggcttttggcatgcatgtttttgatttacagggatgctactaatttttgtacatttattttgtattctgaaattttactgaagttttttgtcagtttgaaaagctttcctaggcctggcgcggtggctcacacctgtaatcccagcactttgggaggccaaggcgggcagatcatctgaggtcggaagttcaagaccagcctgaccaacatggagaaaccccgtctctactaaaaaaacaaaattagccgggcgtggtggcgcatacctttaatcccagctactcaggaaggctgaggcaggagaattgcttgaacctgggaggcagaggttgcagtgagccaagatcgcgccaccgcaccccagcctgggcaataagagcgaaacttggtctcaaaaaaaaaaaaaaaagaaaagaaaagaaaagcttttctgtgatgattatagggtttttcagatacagcattatgtcatctgtaaaaagaaataagtttgacttcctttcttcctgtttgtatgcctttttttttttatcttgcctaattgctctagccaggacttccaattttatgttgaataggagtgttgagaggaggcatgcttgtcttgtgcctgttttcaaagaaaaatgattccaggttatgtatattcagtatgttggctgtgggtttgtgatagataactcattattttgaagtatgcaccttccatccctagtttgttgagactttttaacataaaaatgttaaattttattgaaagccttttctgcatctattgacatacttttgtgctttctgtcttcagttcttattatgtgatgaatcacatttattaattcatgtgtgatttttttttttctttgagatggagtctcactctcttgcctaggctggagtgcagtggcgcgatctcagctcactgcaacgtctgcctcccgggttcaagcaattctcctgccttagcctcccaagcagctgaattacaggtgcttgctaccacgctcggctaatttttgtatttttagtagagacagggtttcaccatgttggccaggctggtctcgaactcctgaccttgggtgatctgcctgctttggcttcccaaagtgctgggattacaggcgtgagccaccacgccccacctcatatatgttgaattagccttgcatccccaaaataaactctacttgattatagttggttaggtttttgatgtcctgctcaatttggtttgccaatattttgttgagaatttttgcatcaatgttcatcaagaatattggtctaaagttttcttcttttgttttatctctgtcaggttttggtatcagaatggtgctgtttttagttttttggaatagtttcagtagaagtggtaccagctgtcctttgtccatctactagaattcagctgtgaatctatctggtcctagcctattttggttggtaggctatttattactaattcagttttcaagcttgttatttatctattaagggctttgatttattttttgttcagtcttgagaggatatatttattcaagaatttttccatttcttctagattttcaagtttgtgtgcatagaggtgttcatagtagacttcaatatatttttgtggggtcagtggtaatgtctcttttgtcatatttaattgtgtttatttggatcttttcctttttcttcattaatcttaatggtggttggttttatttttatgtttttaaaaattttactcctgtacttgttgatcttttgtatagtttttcatgtcaaaatcttccattcagaaatgattttggttatttcttctgctagcttaggggttgatttgctcttgcttctctcagtgttttatttatgatgtcaggttgttaaactgaagtctttctaacttttcaatgtaagcatttaatgctataatttttttctcctaacactgccttagctgtgttgcaaaaattcaggtatgttgtatctttgttctcatttttttcagagaacttcttggttcctgccttaatttcattatttacccaaaagtaattcaagtgcaggttgtttaatttgcatgtacttgtatgattcaagtgattttctttgtattgaattacatttttatcaagctgtggcctctgtgtgtggttcatataattttggaatttttaaatttgctgaggattgttttgcttctgactgtgtggtcaattttagagtatgtgccacgtgatgatgagaagactgtatactatgttgtttttagatggagagttctgtagaaatctattaggactgtttagtcaagtgttgagtttaggtcttaatatctttgttaattttctgcctcaataatgtgactattagtgcccacgggtgttgtagtctcccactattattgtgtcagtatctcattctcttcataggtctctaacaacttgatttatttatgtgcccccatcaatttatttacttatttattttttattttttgagacggagtcttgctctgttgcccaggctggagtgcagtggggcgatctcggctcactgcaagctccgcctcccgggttcacgccattctcctgcctcagcctcccgagtagctaggactacaggcgcctgccaccatgcccggctaattttttgtgtttttagtacagacggggtttcaccatgttagccaggatggtctcgatctcctgacctcgtcatccgcccgcctcagcctgccaaagtgctaggattacaggcgtgagccagcgcgcccggccacgcccccatcagtttattataacatctttctctcttctgcttttttaccataaacattctttcacattcacaatccagatgtcccagagttcaagaacgtgtccagtgacctggttgttttaggagaaaatgtaaattaaaaataagaggctttatttacatacgtgaaaataagggaggatattttgttcatctctgttttattaaagcatttagattatatgtaggtatttttctctgcttttttgaaatatacataaattatattaacagctaaataaaccttttgtctttttttttttttttttttttttgagatggagtctcgcactgttgcccaggctggagtgcaatggcatgatcttggctcactgcaagctctgcctcccgggttcacgccattctgctgcctcagcctcctgcgtagctgggactataggcacccaccaccacgcccggctaattttttatacttttagtagagacggggtttcaccatgttagccaggatggtctccatctcctgacctcgtgatccacctgccttggcctcctaaagtgctgggagtacaggcgtaagcgaccgcgcacggccttgtcattctttttgactcaggattgtctttatttgtaacctgagattcattgctttgtgtttgctttggcagaggtttatttttttaattttcagtcattaaaagtacacacagatttattcagagtaaagctcattttaagagcacttgaaagttggacacaaaggtagaattaaatttagcaatacagaatgataaagactaaaagatacagagttaagttcctttgacagaaacttgattatccaaggtacttatttgcaggctgaagtacttacaatgcaaaagcaaggtctggccgtggtggctcactcctgtaatcccagtgctttgggaggccgaggcgggctgatcatttgaggtcaggagtttgagaccagcctgaccaacatagtgaaatctgtctctactaaaaatacaacaacaacaacaaaattagccaggcatggtggcgcatgcctgtagttccagctacttgggaggctgaggcaggagaatcgcttgaacctgggaggcagaggttgcagtaagcgcacatcttgtcactgcactccagcctgggcaacagagtgagactctatcctcaaaaaaataaaaataaaaaaaataaataagtgcagactcagtcggatattgctgctttctgttttctctgtaaactttaaaaagccaacaaagattatgatactttaagatggagattagttgtcttcaatttgttccagaagtaattgtgttgtgacaagagtgccaagtataagggactctgtgctgtgcctgctttctctaactaatgctaataatgagcctagggggagcatcatcagcattgacaggggacttatttaaaacacccattcatggacctttccatacctgcagaatcacattacatagattgagaccaacattaccaagtgatttataagctcaataaaacttgagaggcaatgcttagttcagtggttgtaagcccaggctgctaattacaatcacatggccagtttgcagaactccctttactggtgcccttcccacaggttctgtttaatgttctgggtggaagcattcatgttattttaattaactgcctcatgtgactctaagttgtggccagaatcaagtatagggggttcaagatacatttatgagagttaagtttcacctgtgcactaaagggtagtcctagagcctcttttctttgggtttcatagggacagggcagtgtggctcatacttttgttactgtagcagaaattgctggcaggggagggcacctgaagacaggaaaggagaaacttgtatttttatatctgtagagcagctcattgttgctgaatctcttctgttataaagtacagaaatgggtggagttttttctgttttgggtcttctgcctgtgggtgtggtggtagcaggtaaacatgtggtgctgacacttttcaaggcatagtctcaagatgcggtgtaatttgtccagagaatcttatctgagaaggaatcctagaaaagaaggagaaagagaaaaaatggcattcttaatgatgaaatattgaatacttattttatttttattttactttaagttccaggatacatgtgcagaatgtgcaggtttattacataggtatatgtgtgccacagtggtttgctgcacgtattgacccatcttctaggtgccctccccttgccccccactccacaacaggccctggtgtgtgttattcccctccctgtgtccttgtgttctcattgttcaactaccacttatgagtgagaacatgcggtttttggttttctatccctgtgttagtttgctgaggatgatgacttccagcttaatccatgttcctacaaaggacatgatctcatttctttgtatggctgcatagtattccatggtgtgtatgtaccacattttatctatccattctgtcattgatgggcatttgggttgtttccatgtctttgctgttgtaaatagtgctgcagtaaacatacgtgtgcatgtgtctttataatagaatgatttgtattcctttgagtatataaccagtaatgggattgctgggtcaaatggtatttctggttctagatccttgaggaatcaccacactgtcttcgacgatggttgaactaatacacattctcaccaacagtgtaaaagcattcctatttcttcacagcctcaccagcatctattgtttctgactttttaataatcaccattctgactggtgtgagatggtatctcattgtggttttgatttgtatttctctaatgatcagtgatgttgagcttcttttcatgtgtgttggctgcataaatgccttctgagaagtgtttgttcatcttttgcccactttttttttttgagatggagtcttgctctgtctcccaggctggagtacagtggcacgatctctgctcactgaagcctacacctcctgggttcaagtgattctcctgccccagcctcccgagaacctgggactacagatacccaccaccacgcccagctaatttttgtatttttagtagagatggggtttcaccatattggccaggctggtctcgaactccatacctcaaacgatccacccaccttggcctcccaaagtgctgggagtacaggcatgagccactacacccagcctttgctcactttttgatggaattgttttttttcttgtaaatttttaaaagtttcttgtaaattctgaatattagatctttgtcagatgggtagattgtaaaatttttctcctattctgtaggttgcctgttcactctgctgatagtttccttttctgtgcagaagctctttagtttaattagctcttatttgtcaattttgggtttagttgcagttacttttggcatttttgtcatgaagtctttgccgatgcctatgtcctgaatggtattgcctagattttcttctagggtttttatggttttgagttttacatttaagtctttaatccatcttgagtaaatttttgtataaggtgtaaggaagaggtccagtttcagttttctgcatatggctagccagttttctcaggaccatttattgaatagaaaatcctttccccattgcttgtttttgtcaggtttgttgaatatcagatggttgtagacgtgtggtgttatttctgaggtttcttttctgttccattggtctatatgtctgtttttggaccagtaccatgttgttttgcttactgtagtcttgtagtatagcttgaagtcaggtagtgtgatgcctctatctttgttctttttgcttaggattgtcttggctatatgggctcttttttggttccatatgaaatttaaagtctttttttctaattctgtgaagaatgtgaatggtagtttgatgggaataacattgagcccataaattactttgggcagtatggccattttcatgatgttgattccttctatccataaggatgggatgtttttccatttgattgtgtgctctcttacctccttgaggagtggtttgtagttctccttgaagaggtccttcacattccttgttagctgtatttttagatattttattctttttgtagcagttgtgaagtttatttatgatttggctctctgattgtctgttgttggcttataggaatgcctgtgatttttgcacattcattttgtatcctgagactttgctgaagttacttatcagcttaaggagtttttgggctgagatgatggaattttctaaatatagaataacgtcatgtgaaaacagagagaatttgacttcctcttactctatttgaatactctttatttctttctctttcctgattgccctggccataacttctaatactatattcaataggaatggtgagaaaggacatccttgtcttgtactggttttcaaagagaatgcttccagctttttcccattcaatatgatattggctgtgggtttgtcataaacagctcctattattttgagatatgttccattaacacctaatttattgagagttcttaacatgaaagaaagttgaattttatcaaaggccatttctgcatctattgagataatcatgtgatttttgtctttagttctgtttatgtcatgaattatgtttattgatttgcatatgttgaaccagccctgaatcccagggatgaagccgacttgatcatggtgaataagtttttgtttttgtttttgcttttttgagaccgagtttctctcttgttgcccagtgcaatggtgtaatctcggctcaccgcaacctccgcctcctgggttcaagtgattctcctgcctcagcctcttgagtagctgagattacaggtatgcaccaccacgcccggctaattttttgtacttttagtagagacgaagtttctccatgttggtcaggctgggctcaaactcctgacctcaggtgatctgcctgcctcggcctcccaaagtggtgggatttcgggtgtgagccactgcgcccggcctggtggatgttttttgatgtgctgctggattcagtttgccagtttttttttgtttgtttgtttgttgttgttttttttttttttaggcagagtttcattcttgttgcccaggctggagtgtaattgtgcagtcctggctcactgcaacctccgcctcctgggttcaagtgattgtcctgccccagcatcccaagtagcctggattacaggtgcccgccactacacccagttaatttttttttttaatttttattagagatggggtttcaccatgttggccaggctggtctcgaactcctaacctcaggtgatcccccccaatctcggcctcccaaagtgctgggattacaggggtgagccaccacgcctggccctattttgttaattttttcaaaaaacagctcctggattcattgatttttttttgagggtttttcatgtctatctccttcagttctgctctcatcttagctatttcttgtcctctgctagcttttggaattggatttgtttgctcttgctttctagctcttttagttttttttttttttttttttgagatggagactcactctgtcacccaagctggagtccagtggcgtgatcttggcttactgcaacctccgcctcctgggttcaagcaattctctctgcctcaacctcctgagtagctgggattataggtgcccaccaccacacctggctaattttgctattttttagtagagatggggttttgacatattggccagaggctggtcttgctctcctgatttcaggtgatttgcctgcctcggcctcccaaaatgctgggattacaggcgtgagtcaccgttccccgacttagctcttttaattgtgatgttagggtgtcgatttgagatttttctagctttcttatgtgggcatttggtgctataaattccccttttaactctgtcccagagattctagtatgttgtgattttgttctcactggtttcaaagaacttttgatttctgccttattatttacccaggagtcattcaggagcagattgttcattttttatgtaaatgtgtgcttttgagtaagtttcctaatcccgagttctaatttgactgtgttgtggtctgagagactgtttgttaccatttcagtcctgttgcattggctgaggagagttttacttccaattatgtggttgattttagaaaagtgccatgtggcactgagaagaatgtatattctgttgatttggggtggtgagttctgtagatgcctattaggtccacttgatccagagctgagttcaagtcctgaatatcctagttaattttttgtcttgttgatccgtctaatattgacagtgaggtgttaaagtctcccactgattgtgtgggcgtctaagtctctttgtaggtctctaagaacttgcttcatgagtctgagttctcctgcattgggtgcttatgtatttaggagagttagctcttcttgttgaattgactcctttaccattaaataatgcccttctttgtcttttttaaatctttgttggtttaaagtctgttttgtcagagactaggattccatcccctgcttatttctgctttccatttgcttggtaaattttgcttcatccctatgtgtgtctttacacatgagatgggtctcctgaatacagcacactgatgggtcttgactctttatccaatttgccagtctgtgtcttttaatttgggcatttagcccatttacatttaaggttagtattgttctgtgtgaagttgatcctgtcatcatgatggcatctggttattttgcacactagttgatgctgtttcttcatagtgtcattggtcttcatggtgtgtttttgcagtggctggtaccagtttttcttttccatatttagtgctttcttcaggagctcttgcaagccaggcctggtggagacaaaatccctcagcatttgcttgtctggaaaggattttatttctttttctactcatgcagcttagtttggctcgatataaaattctgggttcaaaattcttttctttaagaatgttgaatattggcctccattgtcatctggtttgtaggatttctgctgagaggtccactgttagtctgatggacttattttgtaggtgacctggcctttctgtctgactacccttaacatttttttgtcatttcaaccttggagaatctgatgattatgtttcttggggttgatcttcttgtggaatatcttagtggtgttcttggtatttcctgaatttgaatgttagcttgtcttgctaaactggggaagttctcctggatgatatcctgaagtgtgttttccagcttgtttccattctccccctttccttcaggtattccagtcaattgtaggtttggcctttttatgtagtcccatatttctcggaggctttgttcattcttgttcattcttgttcagtctttttttctctaatcttgtctgcatgccttatttcagcaaggtggtctgcaaactctgatattttttcttctactttgtcaatttggctgttgatacttgtgtatgcttcatgaagttctcatgctgtgtttcttagctccgtcaggtcatttatgttcctctctaaactggttattctagttagtggctcctctcgctaactttttatcaaggttcttaggttttttgcatttggttagaacatgctcctttagctcagtggagtttgttattgcccatcttctgaagcctacatctgtcaatttgtctatctcattctccatccagttctgcacccttgctggagaggcattgcaatcatttggagaagaagaggcacccttgccttttgggttctcagtgtttttgtcattgattctcatcttcatgagtttgtctagtttcgatctttgatggggttcttgtggggacttttttgttgctgttgttcatttctgtttgtttttctttcaatggtcagatccctcttctgtatggttgctgtggtttgctgggggttcacttcaggccctatttatctggttcacttctgaacctggagatattaaggagattggagaacagcaaagatgggtgcctgctccttcctctgggatctctgaccttaaggaacaccaatctgatgccagtaggaacacagctgtatagggtgtctgacaaccccagttggagtatctcacccagttgggtggcatgaggaacagaacccatttaatgaagcacttttattgtcccttggtggagggggtatgcttcactggggttaaactcactcctctgggctgcttggattcctcagaactggcggggggaaaagctaagtccactggtccacagaaactgcagtcacctctccccctagggactcaggcccagggagatcagagttctgtccctgagcccctggctggagttgttggagttcctgcagagtggccccacacagtgaggagggatgtgtcagggtcaggcctgaagaggagctgtagctgcagtctggcacagccagtgtgttaggctgtgggggacacctcttgggaccaagccgtccagcatccctggctccagcaggggaaaagcatggccaggagctatagagatgactgccgcccttcccctgcccagggagcctagtgtgttaggcagctgtcagtcccagtgctggttgctgcccctcccccagggagctcaaatggcttaaacagcaggcagccatagctgtagtgctggtcacccctcccctgggaactcagcaggcttaagcagattttagctgagaggctgttgagaatctgcacagctctggggttgggatcctaggccccagtggcatgggttcacgagtgaaatctttcagtctatgggttgcacaattccatggaaaaggcatggttttgtcggctaagtagcacattcattcaccgcctcccttggctggggggtgggggctcccctgccccgtgtggctctcaggtgggttgctgcaccacactgctctttcttcctctctgtgggtcatgccagctgcctagtcagttctgatgagagaacctggatacctcaggtgccagtgcaggattcacaggccattatggttcttttcggtgggagtctctgatcaccgctgcttctagttggccatctttgccctgcccctaaaaaatggcttttttttctttttaagctaaacatgtctcagatgaagaactgtgtccactctgcctcctggaatgccatgtgttcagtacttgcaaagctttacttttctacttgtgctttttcttcctaatgagtttaactactttttagttcttataatagtcaaaggtctctgaaaaatatttctttcctacataccagagtcttctctacattctcaacatcatggcttcttacatgtcatcaagaattctcaccatgaatttatgaactgcaatattaagaatgtttccttcgtggctatggaacatgggaaggtgtagatactcaagattcctattggggaaaagctggggtccttaataaagatggagagcatgtaattttgaggttccatctctgttctccattagctgtaaacaaataagattaagaaaatgcttatttaaatgggatggcatttattacgcagaaagtttaaaaataataataattaggagatacttgctctttagggtgtgaaagaaagactacttaaaatcactattaaaatttacagaacatggcagatattggtatctggaactttacataaaaccagtgtttctttatgattaaattcagactataatttacttttggctgggcaatatcatagcagtgatgccgtgtccttctgtgtgcatcagcacatttgtcttcatgcacttgatgttaataactcacttgattaatgaactctgtgacagatttttttctatagagttaattatttttctcttcattactgagtatctttattcagcagatgtgcataaacaatcacatttaatctggcagctgacctttcttaggctttttttttttttttttgagacggagtctcgctctgtcgcccaggccggactgcggactgcagtggcgcaatctcggctcactgcaagctccgcttcccgggttcacgccattctcctgcctcagactcccgagtagctgggactacaggcgcccgccaccttaggttttctttgcatttatctgtctttggaaaatgaaagctctcatctttgtttacaggccagaaaaactgaaaaacacacaggcttttccacttactggatgtttgacaaaatagttttcttggaccaaaaacatgggcattactggtgagcttgttagagattcagaaactcagattttattccaaattttcttttcttttttttttttttgagacggagtctcgctctgtcacccaggctggagtgcagtggcgcgatttcagctcactgcaagctccgcctctggggttcatgccattctcctgcctcagcctcccgagtagctgggactacgggctctcgcctccacgcccggctaattttttgtatttttagtagagacagggtttcaccgtgttagccaggatagtctcggtctcctgacctcgtgatccacccgccttagcctcccaaagtgctgggattacaggcgtgagccatcgctcccagcccagattttctgaaaaaataatctgcattaacaagatctccagtttattgtacacattaacatgtgagcagtattttctaactgaatatgtcttttccatctgaaaaatttacacaacttattctgtatgatgtaaatgtagcactcaaaaatgtacatgttagtgttaatgccctcaattttatacttcatcatccgaagaagtatcatacttacctcgatgttgtggatcttatgccactctcttttctcagagttagagaatgcattagagaatatacttctgtgctgaaagttatttattaaatatatcagtcactcctataagtaagaaccagttctctttactcttgttttaccttgagtcaaattaaaaattctgttcatggccacttggtaaatatgtatgtgtgtttgtatgtttttcagggagtgttgacatttagggatgtggccatagaattctctctggaggagtggcaatgcctggacaccgcacagcagaatttatataggaatgtgatgttagagaactacagaaacctggtcttcgtgggtgaggataacttcaatatacaattccctaatataccctataaattttatttctcttttttgtagaatggtttttggtaatttatgctttcagatctctgttttttgtttttaacttcaagatttgtctatgtagaaaagaatttcaagatgtttcattttgacctgaactttccacactcctgagctgatctgtgttcttcactctagattagtgttaattttagaaatttagtggcataacgtactgttgcccacatcttaaaatctaattgccactaccagtttttgatttagtagtatcaggtagtgaaattaagaacttacaaaattaaaatatttcctaaatatttaaaattttttgttgtgtattagtattttggaatcaatttactagaatattctattacatccttttttctgaacacactactaaattggtaattggagaatatgagcaagattcatgttatttgtaataaaacaggtattgctgcctctaagccagacctgatcacctgtctggagcaaggaaaagaaccttggaatgtgaagagacatgagatggtagctgaacccccaggtaggtgagagtgaaagtgaatacaacagatgacacagatgagagctccaaagtagaaaaaaaaaaaagccagtccttaaaatgatttgaaatctgtgttccaaaggaaatagtttctgggaagcctgaattttttaaattttgctttcacatagaagcatcttctgtcttatatttttaaaatctctgaagattttactttccctttggtgatcttcttcaagtttacagtgacagccaagacagccctcttcatggcacataagagactgtgaaatctgactttttcactgtttttgaaaacacgtagataatctgcataattttgagaaactctatgttaaactgtttttcaagttctgtttttacattatgtcctaaatgtgtgagagcagtggtttctgttccattggtttctttattgctaatttttctgcacattgcattctgtcttattatagtcttgaagtatagtttgaaattataaagtatgatgttcttctgctttgtcctttttttttcaagattgctttggctattcaaagtttattgtaagtctatgtgagaattgtattttctttttctctttcttttttttttttttgagatagagtctcgctctgtcacccaggctggagtgcagtgtcatcatctcggctaactgcaacctctgcctcctgggttcaagcgattcttctgcctcagcctcctgagtagctgggaatacaggcgcgagccaccatgcctgactaatttttgtatttttagtagagatggggtgtcaccatattggccaggctggtctcgaactcctagacctcgtgatccgcccacctcggcctcccagagtgctagaattacaggcgtgacccaccgtgcctgactgagaattgtattttctattgctgtaaaaaaaaaatactggaattttgatagagaatttattgaatctagagagcactgtagataacacggcactttaataatattctttcagccgggcatggtggctcacgcctgtaatccctgcactttgggaggccgaggcaggcggatcacctgaggtcaggagtttgagaccagcctggccaacatgatgaaaccctgtctctactaaaaatacaaaaaattagtcaggcgtggtgacaggcgcctgtaattccagctacttgggaggctgaggcggaagaatcgcttgaacctggtaggcagaggttgcagtgagctgagattgcaccactacactccaatgtgggcaacaagagtgaaactccatctcaaaaaaaaaaaaattctttcaatcaatagacatgaaatgtttttaaatttatttttgtcttctccaatttttttttattgatgtatcttttatttgaaagatatttaagctccttggttaaatttgttctcagaaatttattattttagtgctattgtaaataagattgctttctgtctcttttttgtcagatagtttgtttaaagtgtatggaaccataacttacacttgtatgttaattttctattttgctaaattattgagtgtaattattactttaattaggttttaaatgtactgtttatggttttctatatacaagatcaaatgatctacaaaaagcaactttttacttatttgtcttcaatttcagtgacttaatttttttttttttttttttacttattccacatacttccagtgctgtgttaaaatagaagcgttgagaatgggcataataaacttttgcattggtgtctgtgagtttgaaggagcaaacacctcttcaagtttttcttgttgttttttttttttttttttttttttttgagacagcgtctcactctgtcgctgagactggagtgcagtggcgcggcctcggctcactgcaacctccacctcccaggttcaagtgattctcctgcctctgcctcccgagtagctgggactacaggtgcgtgccaccatgcctggctaatttttatatttttagtagagatggggtttcaccatgttggccaggctggtcttgaactcctgacctggtgatccacccgccttggcctcccaaagttctgggattacaggcatgagccaccgcgcctggccctcttcaagtttttataaattggtttcagaaagtgaagatcttttgttgagcccccagggtgatgggatgtcctatgggtttgtagtggagaggggtaggtagcttgtttacaaaggctgctgggtctgcattagggtccacctttagttggcttgttacaaggggcttaggtagttgtaattcccattttatttttggacagagtgagtatccttcaggactttgctctgtagggcagacgctagggcagatttctgcacttgggtctgcatatggtaggctttatattaggatgtagatgagtttggctttcactgaaaaccagagaggatttcccatggtcactgtgtgggtttctacataggcagaacttgccatgaactgtggctcagggtgataaaactgagtcatggaactgcttcagggaccacagtaagggccaaggtctgcaggcctgctgcatggctataaaggggtgtctgtctctaggcttctgaaagggcaagacctctcccagactgtggctgggaggagtttgggatgattgcagtgtaagttcagaattctcagtgggaccaagtttggtgggccattttctggtctgtagccaagaacaggggtcctatagtttgccacctgaatgaaagcctgccttctgaagagaatattcctcaatcttgggcattagcagagtttcacagctccctccgtagatctcaaagctctttaagggcacttattttggagatgggttcttgctacataacccaggttgatcttgaagttctgtcctaaagcatttctcattacaggtttgagtcatgattcctgtttctctcataaaggcatttttgtcaggctgatgaattttcttgctgtcagaaaataagcaaataaggcaccatttatttttccatcttagtgatgtcactcttcctgtccatttttactttctactttctatttcaattttgtcagtagttttagatttagacatttaggacaatatactaaaatttacatgttatgtctgaagtgaattaggtaattagtagacagacaaaaaggaaatatagacaggcaaaaaaagattacaggattttcactcacttttgtcagctagtacctaaaatatgacatgatttgttcccaaatatttgtttcatatatcagaggccctgaccatattctgcaaaatagatatattttttctttatttagcaatgtaaggctattttttgcttctaaatttggattacagcagttttattttgtgtaagaatagcatatatttaaaacttagaaatgatcttaaaatgcttatttatcagtttgtcattagagtcttctgtttatgattatactgcattttatctgaaacttttactgcattacagtgcatgccaatgattcaaaatagccaccttcaatgagtacacagttacagtaaaatattacagttatctacacaaattctttgttaatgctacatcaagttacataccagattttatgagtaaacatttattattattttttagtttcatattaacgcattttttcagtgtaggtttcttaacataagtttattgtgttttttggttttacaattttagacaatttgcaattctgtttttacatgtaagtcggtgtgtggtttaagagatagatcagccttatctctattacaatctgattatatgtgtgtgtgtttttatctataaatatgaccccaattttggttatggctaatcttgtatatattttttcttggctgatttttaatggtggctttatcttgtctaaatgagtagtcatggaaatagtcttattttcaccttgtgtttaataataaacatatttcctatgtgtgagggaaacacttttgtgacttgacggtaatttttggaaagatttataattctggatcttcttcagttattcttctaaaaaacaattgtataaacatataacctaaaatttaccaccttaaatctatttaaatgtacatttcatggccagtcatggtggtggttcacgtctgtaatccccggattttgggaggccaaggcaggaagactgagcccaaaagcttgagaacatcctggaagacatatggaaacctcatctctgtaaagcattttaaaacttagccagacatggtgaagtggtcctgtctccttgggagattgaggagggaggattacttgaacctggaagtttgaggctgcagtgagctgtaattgtgccatgcaccccagcttgggtgacagagtgagaccctgactcaaaaacactgtacatttcaggcatgttaagtatatttacattattttataaaagatttctagaaattttacaatacacattaaacaactaccaatttttcccatttcctggcacttttcaaataccgttctgttttctgtttctaagagtataactgctttatatatctcataaaatctgtttgtggctggctcattttattttgcataaagtcatcaagatttacctttatagttgttagaatatttcctgctttttttcaaactgagtaatatattggcatttttgtatttcaaattatatctgctgaacgatttggtgaccgaaatttgccttgcttttacctactggcttttagtaacaatgctaaaataaatgtgggtatgcaaatgactcttcatgtgaccatatatgtgagagtttatatatgtgctgcattctattttattagtctactttttcacctttatagtcataccaaattgttttaattctgtagctttgtgttttgaaatcaggaactgtaatgcctccaacattgttttgttttgtttttaatatttttgggtactttattgtatgtagagattctgtatactcgagggattgctgtttctgtttcttcaaaaatgcagtgagaaatttgaaaaacattgcattaaatctgtagattgcattgagcaggatggacatctttacagtattacctttttcagcctttcacaagagcatgctcaagagtgtgttgtttaatttctatatatttgttaatttttcagattttttttctcgttgtatactcatttcattttggtgatagaaagtaatttataaaatttcagttttaaaaaaactggtaagacttaattttcttctttttgtaataagaggaggtctatcaaggaaaatgttgtattagctattgagaaccatgtgtgtcctggtgttgaggggtgttttctatacctctgttagaaataattgtcttacactgcctggaagtcctctattcccttactaatattctcatttaatttttattacggaaaatgcagtgtcaaaatatcctactataattatgttgctctctatgtgtctctgttattctgtcaatgtttgctttatatgtttggagccctaatgtgagatacacacacacacacacacacacacacacacagagagagagagagacgtgtatacagatttgtcataggttcccagtgagtaaatctgaagtggtttttttttgttgttttttttttttttttgagacagagtctcactctgtgtcccaggctggagtgcagtggtgtgatctcggctcactgcaacctctgcctcctaggttcaagcgattctcctgcctcagcctcccgagtagctaggattacaggtgcccaccaccatgcccggctaatttttgtatttttagtagagtcagggtttcaccatgttggccaggccagtctcgaactcttgacctcaagtgatccacctgcctcaacctcccaaagtgctgggattacaggcgtgagccaccatgcccagcctaaatctgtaagttttaatgtccttttttgtctccttggagttttaacttcaagtacattttgtaaaatatgatagtttttgacttaagatgtagcttgcataatactatcttgatttcttctgctctcatttgattaatatttgcatgaaatgtattcttccatcttgccccttttagtgttttttatcattagatctctactgactcttgtagaaaaaaaagttggatcttggtttttaaaatttttaatctgttgaaagtatgtctcgatttgaaagttaattttatatatacatttaaataattgataaagacggactgttacatttttaattattttatttgattcttgcatctttgtttctcattttctctctttgtgtctttttgatttttgtattgatatgcttttacttatttctaattcacttttgtatatttgtacagatttttttttttggtggcaccttgggggttgcataaaacttctataagaaacaacagtatagttttaatttggtataaaataaatctcagttgaataaaaaaatcttcctcattacatctgccctgaaatttgtctttgatgttgctaattatgtttttacattgtatattcattaacagttgtttataatttctgtgcttttatttttcaaaatttagagatcatttaaaatgttttctgcaccattatgataatgccacaagattctgtttttatgtatgtgcatatctttcctggaaaataatgtatttttatatgattatgtgtttttttttttaatacttttactttcagtttaaggaactgctttcatcatcttttatatgtagggcatatgcagtgctaatatactttttcagaatttggttgttttggaaggttttttctttttatgtggcaggacagatttgttgatggtattatcctcaacttgatagctttttttttttttttcccctcaggactttgtgtcacacggtatctttctgatctgcagaatttttgttgataattcactggtaatatcataagactatgtttgtaaatgacacattacttttaccttgtagctcctaagactttcttcttgtctttgatttttgaaaatgtgcttaatatgtatctgtttaaatatctgtgtgtgtatcctaatttgtttgttgaacttcatttttacatcatttttcttttaggattttccagttgtttatttttctactttttaccaccaaattgttttttttaatattttgatattcttgtatttattctcatttttgtgactttctacagtggactgtgttcctgtttcactcattggatattattcaacttatgagtgtttaaaatgtgtacatcttttttatggtttctttctgaagtttatacggtatttttgatgaaattatattgccctgttttgtatacattgtaatcttggaatgagatttggacatcaaaaaaagctacctgtcacagtctttaaaatgtgtttttttctgacatagtctgaaaacaattatcttggctagagattctgggagtctctcaaacatgttcttaggatctgccttgtctaaaattttgtgtttagtttttagtcagaggagtttatttgtgtttctcttcttttttttttgaaacagagttttgctcctgtcacccaggctgcagtgcaatggcatggtctcagcccactgcagcctccacttctctggttcaagtgattatctggtctcagcttcccacttagctgggattacaggcatgtgaccccatgctcagctacttttgtatttttagtagagacagggtttcactatgttgcccaggcttggtctcaaactcctgacctcagctgatcctcccaccttggccgccaaagtgctaggattacaggtttgaaccaccaaactccttcttaataaccaataatcacttgctataattgtttcctgtctgtagtaccacagtctttctgctgctgtaaaacttacctttcttatttatttatttcattatactttaagtcctagggtacatgtgcccagcgtgcagttatattacataggtatacatgtgccatgggttaatgctatccttcccccagcccctcataccccgacaggccctgttgtgtgatgttccccgccctgtgtccaggtattctcattgctcaattcccacctatgagtgagaacatgtggtgtttggttttctgtccttgtgatagtgtgctcagaatgatggtttccagcttcatccatgtccctgcaaaggacatgaactcatcctttttcatgaatgcatagtattctgtagtgtatacatgccacattttcttaatccattctatcattgatggacatttgggttggttccaagtctttgctattgtgaatagtgccgcaataaatatacgtgtgcatgtgtccttatagtagcatgatttataatcctttgggtatatacccagtaatgggatggctggctcaaatggtatttctagttctagatccttgaggaatcataacactgtcttccacaatggttgaactagtttacagtcccaccaacagtgtaaaagcgtttctatttctccacatcctctccagcacctgttgtctcctgactttttaatgatcaccattctaactggcatgagatggtatctcattgtggttttgatttgcatttctcggatggccagtgatgatgagcatttttccatgtgtctgttggctgcataaatgtcttcttttgagaagtgtctgttcacatcctttgctcactttttgatggggttgttagtttttttcttgtaaatttgtttaagttctttgtagattctggatgtttgccctttgtcagatgggtagattgcatagattttctcccattctgtaggttgcctgttcattctggtggtagtttcttttgccgtgcagaagctctttagtttaattagatcccatttgtcaattttggcttttgttgccattgcttttggtgttttagtcatgaagtccttgcccatacctatgtcctgaatggtattgcctaggttttcctctagggtttttatggttttaggtctaatatttaagtctttaatccatcttgaattaatttttgtataaggtgtaaggaagggatccagtttcagctttctacatatggctagccagttttcccagtaccatttattaaatagggaatcctttccccatttcttgtgttttgtcaggtttgtcaaagatcagatagttgtagatgtgtggtgttatttctgaggtctctattctgttccattggtctatatatctgttttggtaccttacctttcatctcagcagcctcaaactgtcatttgaaagaataccactatttctttcagaacttttatgcaatgagacacaggaaccagtgtaaaagcccctgccattgagaaataaagatgtataagccattattttacttgtcttttaaaaatgaaaccaggagttggcaatttatttctaaagtcactatgttatatagggaagcaggaagatctgcactgggtaaatgtaacagacttttctttcttctatgtgactctttgcattgggctcacctggggcactgcacacacttaacttactttaatttttcagaaatgtaatttgttctgtatgcttttatatgtctgtgaaaatgttagagcgtgtaatattttgctgtaacatcttgtgatgtagtttgtataattttataggttagatttgtaaagtacattcgtctgagtcagtaagtgaagtaatttattatttttatttctttcagttgtatgttcttattttgcccgagacctttggccaaagcagggcaaaaaaaattatttccaaaaagtgatactgagaagatataaaaaatgtggatgtgaaaatttacagttaagaaaatactgtaaaagcatggatgagtgtaaggtgcacaaagaatgttacaatggacttaaccagtgtttgacgactacccagaacaaaatatttcaatgtgacaaatatgtgaaagtctttcataaattttcaaattcaaacagacatacgataagacatactggaaagaaatctttcaaatgtaaagaatgtgaaaagtcattttgcatgctttcacacttagctcaacataaaagaattcatagtggagagaaaccctacaaatgtaaagaatgtgggaaagcctataatgagacctcaaacctttctacacataaaagaattcatactggaaagaaaccctacaaatgcgaagagtgtggaaaagcctttaaccggctctcacaccttactacacataagataattcatactggaaagaaaccctacaaatgtgaggagtgtggcaaagcttttaaccaatctgcaaaccttactacacataagagaattcatactggagagaaaccctacaaatgtgaagaatgtggcagagcttttagccagtcctcaacccttactgcacataagataattcatgctggagagaaaccttacaaatgtgaagaatgtggcaaagcttttagccagtcctcaacccttactacacataagataattcatactggagagaaattctacaaatgtgaagaatgtggtaaggcctttagccagttatcccaccttactacacataagagaattcattctggagagaaaccctacaagtgtgaagaatgtggcaaagcttttaaacaatcctcaacccttactacacataagagaattcatgctggagagaaattctacaaatgtgaagtatgtagcaaagcctttagccggttctcacaccttactacacataagagaattcatactggagagaagccctacaaatgtgaagaatgtggcaaagcttttaacctatcgtcacaacttactacacataagataattcatactggagagaaaccctacaaatgtgaagaatgtggcaaagcttttaaccagtcctcaactctttctaaacataaggtaattcatactggagagaagccctacaaatatgaagaatgtggcaaagcttttaaccagtcctcacaccttactacacataagatgattcatactggagagaaaccctacaagtgtgaagaatgtggcaaagcctttaacaactcctctattcttaacagacataagatgattcatactggagagaaactctacaaacctgaaagttgtaacaatgcttgtgacaacattgcaaagatttccaaatataaaagaaattgtgctggtgagaaataatagaaatatgaatgtgacaaagcctttaaatggttatcacactggattgtaggtaaggtaattcattctggagaaaacttctacaagtgtgaatgaacagtgtggcaaaacttacacaatgctcaaaccttattgcacaggaaagcctttatacttgagaacaaatgtacaaatataaagaaagtaaaaaagtgattaatatctgtgcacatcttattcaacatcagagtttatattaatagcattaaaagtgcaattactgtcaaaagagttcaaaaaataagcatttaaagtgctgaagaggatttattttgaagacaaacattacaaatataaacgaagttgtggtaactttacttgtaacacagatcttgttgtattcattctgtattagagcaaaccctgaggcaattgctcaaactttgttcaacatcagagaatttatatcgaagaaaaaccctgtaaatgtaataaatttagaaaaaaacatttattcaaaaactacaggttagaaaattccagagagttcatattaaaatatttttgcatatacagtaaatagaaaaaaatatttaattcaatggtaagtttatgtaaatatcagagaatttatgttagaaatatataaggcaatgacacttcagactttacactgaatcagagttctgagtttagaaagtaatccaaaactaaacttggcagaaaaattatttgtttataactttaaaagagtagaagattttttggagagttacaagtatacttttttttagaaagattacagattttttttaaaagtaaataactctcaaattacttcatacaaataatgttgtaattaactcaaattacttcgtgttaatgttgtaattaactctcaaattacttcatgctaaggaaattagtttttctttttcttcttctttttttttttttttttagatggagtcttgctctatcgcccccccaggctggagtacagtggcacgatctcagctcactgcaacctccgtctccagggttcaagtgattctcctgcctcagcctcccaagtggctgggattacaggcgcaaaccaccatgcgtggctaaattttgtatttttaatagagccagggttttgccatgttggccaggctggtctcgaactcgagactttaggtgatccgcccagcttggcctcccgcaatgctgcaattacaggtgttagccactgcgcctgcctgatgttgtttctttattcctattgtattcatatgtgaaagcatgtgaccaaaagatatgaggattattttttattaggtgagcatttatgacctcttctatgaaagagtaaggacattaaaatgcatgatgaaaatctaagtaaagaggttctttgtgattcacttacagtactgagtgatgcatgaggtaggtgttctgagtaatattctgcattatattgagagacaaatttttagttttagttaaaattaaaaataaattagtatattattttactaattttacttttatgaaaatgcagtacatgttaaaaattttagattatgtgtgaacttaatttcttaattcaacatttttaacagtttaaatattgtgcattcaatcaagtcacattattccacttactttaacctagtccaccttactcaagggtgtaggtaaaaggtggtaacaaggccgggcacggtggctcacgcctgtaatcccagcactttgggaggcaaaggtgggtagatcacctgaggtcgggagttcaagaccagcctgaccaacatggagaaacgccatctctactaaaaatacaaaattagccaggcatggtggcgcatgcctgtaatcccagctactcgggaggctgaggcaggagaatcacttgaacccgggaagcagaggttgcggtgagccgagatcatgccatggcactccgtcctgggtgacaaagtgagactccctctcaaaaaataaataagtaaataaaataaatggtggtaacaatacactatttggtaaaagaatgcactaacatctgtagtactaatcttttttccagtggctttaaactgcaaataaggaatgttgtttctgtaggtaaaatttttatttattttttcccatttaaatttacttttgttagttttttcaggcatataatatttatgttatatatggcatattctgataagaggcatacaatatgtaataatcacattagggtaaatgaggtatccatcacctttagaatttattttttgtattatgaacagttcaattgtacagttttagtttttttaaaatatacgattgttattgactacagggttatttttataataaaaattatatacaagtataaaatttacacatttctgagtcctgaataaataaaaataatttcttgtatatttttctttgaatatgtggcctctctacttgcaaacagatacaggcttttagttttgatttacatagagttaaatgtacacatctattagtctaaatataaaccttaggtgtaagaagattatggattaagtgtgtttgagtatgagtttgtaactattttcagaataatattggaacaagacatcattttaataaggtgtctaattttcttttcttttttcttttttttttttttttggagacagaatctcactctgttgcctaggctggagtgcagtggcgtgacctccgctcactgtaactctgcctcctgggttcaagcagttctcctgtttcagcctccctagtaggtaggactacaggcgcaggccaccatgcccagataatttttgtatttttagtacagatggggtttcatcattttggtcaggctagtcttgaactcctgacctcaggtgatccacctgcctcaatcttccaaagtactaggattacaggcgtgaaccactacacctggtcaggtgtctacttttttagaaaacaaaaatcctcaaaaatgaatgcaaatctatactctggtttgtattgaattttactgtataattttacggcttatggttcagaatcttgccattcaaattctcttgttttcacttgtctggtactcatgctaggcccataaatttcttgtttctgatatatatttgttgttttatagtttatgaggtattcattttgtgagctgctctgtgattataagaatgattttaatgaaatttagttatgggctgggtgcagtggctcacacctataatcccaacactttgggaggccgaggtgggtggatcacttgaggtcaggagttcaagatcaacctggccaacatggtgaaacctcatctctaccaaaaataacaaaaattagccaggcatggtggcatgctcctgtaatcccagctactgggaggctgaggcaggagaatagctttaacccgggagacagaggtcacagtgagccaagattgtgccactgcactccagcgtgggcgacagagcaagactccacctcaaaataaaataaacttagtcatgtacacaaaataatttttagctgtaattctaaaattagtgcattaaattttatttagttggaacatttcatttaattggagaaccctatataagcctacttttcgtatgttattttttttcactttttgtgatggatataagtaaatttattcattaggcgatttgttcaggtaagtactagggaagcttcataagtcgagaatgtttttatacataaatgtagcaaacaaacatgacagtgcttgctgtataacagatgctccataataaggcataaatactcctgtgaaagttgcaaacttcaagtcaggtggaaaatatcaaaggtaaacaaataacattgattcttcatgtggaggggacattttattttttttcaggctgcaaagctgaattttgctgaatttaaaaagaaattctgcttcatttattttctaattatcttaagctttgtctttttatgtgtattccacccacgtatacatcatagcccttctttttctgtgttaatggctgcagttatcccactgtttttttcatgccatgtcatctcacatggtattttgtgggttttgatgagaactttggtattttttaatggactgaaaaaatggttttaactggagagtttgcttatcaatataactttcagatcagttaattaagataaaaggcatacatgtccacaggcgagaggattaaatcagttagtgttgtgctgctttctttgtaaaaagaaaaaatattgttagaaaaagagtcttactagattcttacccaaagtgtgacaaatacaaaatttcctagaaaatatagaaattagaattttagagagtttatggtaagtgaaccatattaaattattattttttaagacagagcctcactgtcacccaggctggagtacagtgtcacaatctgggctcactgcaacctacatcttccaggttcaagcagttctgcctcagcctcccaaatagcggggattgtaggcacccgccatcatgcctggctaatttttgtatttttgtagagacagagtttcaccatgttggccaggctggtctcaaaactcctcgtgatccgccagcctcagcctcccaaagtgctgggattacaggcatgagccaccgcgcccagcaaagaaaactaatttgtatgaaagaataaaagagcccaaatagtcaaggcaacgtcagaaaaaaaaaaaaaaaaaaaaccagaggcctcctattacctgatttaaaattgtactacaagctacagtaaccagtattacatggttctggtatgaaaatatacatttagatcaatggagaagagaaagccctgaaatctgcacttttacaaccaagttaattttcacaaagcccacagaaattaacaaagggaaaataactgcctatttaataagtgggggctggatgcagtggctcacacctgtaatcccagaactttgggaagctgaggctggtggatcacgagttccggagttcgaggccagcctggccaacagggtgaaaccctgtctactaaaaatacaaaaattatccaggcgaggtagcaggcacctgtagtcccagctactcgggaggctgaggcagaagaatcacttgaacctgggaggtggagattgcagtgagccaagatggcgccactgcactccaccctgggtgacagagtgagactttgtttcaaaagtaataataataataaatggtacagggaaaactggttatgtgcagaaaaaagtggactcctacctctttccatatagaaaatgcaagtcaagatagattaagaacttatctgtgagtcttcaagctacacaaatcctagaagaacatttagaaaggactgctgtagacactggcctctggaatgaatttatgaataacatcttaaaagtgcaacaacaataaaaatcaaaaatttgcatctaattaaactaaagagcttccgcacagccaaagaaactatcaacaaaggaaacataccttacaatgtgaaataaaatatttgcaaagtgcatacaactgattaatatatcgaatcttaagaaatttaatttgacaaagcagaaaatatcgacacttctcaaaggaagacgtaagagttgccaataaacattcaaaaaatgcttaacatctgtaatcatcagagatgtaaatcaaaatgacaatatgataccatttcacaccagttagaatggctgttatcataagtcaaaaaattacatgttgaagttgtggagaaacagctttctgtttcaacttcatcctgacttcaggagaaacgggtgcctataaatcttagattggataagaaaaatgaggtacttacagactgcaatactatgcagtcacagaaaagagtgaaataatgtcctttgtggcaacatgaatgcagcagaaggccattaatgtaagcaaattaacagagatcagtaaaacaaataccacatgttctcacttatatgtgggaggtaaacattggatgctcatggaaacaaagatgaaaacaataaacactgggaattccaaaaagatggaagaagaaagggagacaaacgctgaaaaactacttaccatgtgtagtgtacactgcttgggcaatgggatagttaaaagtgtccaaacttcaacaccatgcagtatacctatgctaccaatctgcaggtgtattccctgaatctaaaatagaaataacaagatgttttgtggtataatgaaatgttatatttctgtagttccaagttaatagttggaattagcagtgaaagaattatttactccttaaggcataggggtaaatgtttctatacccagtctccccacattttgtaagctatcttctctgaaagctcttggcctatagcccaagatgtcttttattcccaagtgtgcagttaaaatagatgactctggatttaagggaggttccaagatggccaaataggaacagctccagtctacagctcccagcttgagtgacacagaagatgggtgattttctgcatttccaactgaggtactgggttcatctcactggggcttgtcggacagtgggtgcagcccacggagagtgagccgaagcagggcggggcaccacctcacccgggaaatgcaaggggttggggaattccctttcctagctaagggaagccatgacagatggtacgtggaaaatcgggacactcctaccctaatactgtgcttttccaatggtcttagcaaacagcacaccaggagattatatcccacgcctggctcggagtgtcccgtgcccacgaagcctcgctcactgctagcacagaagtctgagatcaaactgcaaggctgtagtgaggctgggcaaggggcatctgtcgttgctgaggcttcagtaggtaaagtggctgggaagctcaaacggggtggagcctaccacagctcaaggaggcctgcctgcctctgtagactcccacctctggggccaaggcatagccgaaaaaaaggcagcagaaacttctgcagacttaaacgtccctgtctgacagctttgaagagagtagtggttctcccagcacagagtttgagatctgagaatggacagactgcctcctcaagtgggtccctgacccccaagtagcctaactaggcaacacctcccagtagggactgactgacacctcatatggccgggtgcccctctgagacgaagcttccagaggaaggatcaggcagcaatatttgctgttctgcagcctccactggtgatacccaggcaaactccaacagacctgcagctgagggtcctgactgttagaaggaaagctaacaaacagaaaggacatccacaccaaagccccatctgtacgtcaccatcatcaaagaccaaaggtagataaaacccacaaagatggggagaaaccagagcagaaaagctgaaaattctaaaaaccagagtgcctcttctcctccaaaggaaagcagctccttgccagcaacggaacaaagttggatggagaatgactttcacgagttgagagaagacttcagacgatgggtagtaataaacttcttcgaactaaaggaggatgttccaacccatcacaaagaagctaaaaaccttgaaaaaagattagacgaatggctaactagaataaacagcatagagaagaccttaatgacctgatggagctgaaaaccatggcaagagaactacgtgacacatgcacaagcttcagtagctgatttgatcaagtggaagaaagagtatcagtgatcaaagatcaaatgaatgaaatgaagtgagaagtttagagaaaaaagagtaaaaagaaatgaacaaagcctccaagaaataaggactatgtgaaaagaccaaatctacgtctgattggtgtacctgaaagtgacggagagaatggaaccaagttggaaaacactcttcaggatattatccaggagaacttccccaacctagcaaggcaggccaacattcaaattcaggaaatacagagaacaccagaaagatactcctcaagaagagcaactccaagacaattgtcaggttcgccaaagttgaaataaaggaaaaaatgttaagggcagccagagagaaaggtcagcttacccacaaagggaagcccatcagactaacagtggatctcttggcagaaactctacaagccagaagagactgggggccaatattcaacattctttttttttttttttttttttttgagacggaatcttgctctgttgcccaggctggagtgcagtggcatgatgtcggctcactgcaagatccgcctcccgggttcatgccattcttctgcctcagcctcctgagtagctgggactacaggcgccaccaccatgcccagctaattttttgtatttttagtagagatggggtttcactgtgttagctaggatggtctcgatctcttgacctcatgatccacccacctcagccttccatagtgctgggattacaggtgtgagccaccgtgcccgactcaacattctcaaaagaattttcagcccagaatttcatatccagccaagctaagcttcataagtgaaggagaaataaaatcctttacagacaaacaaatgctgagagattttgtcgccaccaggcctgccttacaagagctcctgaaggaagcactaaacatggaaaggaacaaccggtatcagccactgcaaaaacatgccaaattgtaaagaccatcaatgctaggcagaaactgcatcaactaaccagcaaaataaccagctaacatcataatgacaggatcaaattacaatatttaccttaaatgtaaatgggataaatgccccaattaaaagaaacagactggcaaattggataaagagtcaagacccatcagtgtgctgtattcaggagacccatctcacctgcagagacacacataggctcaaaataaagggatggaggaagatctaccaagcaaatggaaaacaaacaaaaaaagcgggttgcaatcctagtctctgatgaaacagactttaaaccaacaaagagcaatagagacaaagaaggccattacataatggtaaagggatcaatgcaattagaagagctaactatcataaatatatatgcacccaatacaggggcacccatattcataaagcaagtccttagagacctacaaagagacttagactcccacacaataatgggagtctttaacacccccctgttgacattagatcaacgagacagaaagttaacaaggatatgcaggaattgaactcagctctccaccaagcatacctaatagacatctacagaactctccgccccaaatcaacggaatatacattcttctcaacgctacatcgcacttattccaaaactgaccacatagttggaagtaaagcactcctcagcaaatgtaaaagaatagaaattataacaaactgtctctcagaccacagtgcaatcaaactagaactcaggattaagaaactcacttaaaactgctcaactacatggaaactgaacaacctgctcctgaatgactactgggtacataacaaaatgaaggcagaataaagatgttctttgaaacaaatgagaacgaagacacaacagaccagaatctctgggtcacatttaaagcagtgtgtagagggaaatttatagaactaaatgcccacaagagaaagcaggaaagatctaaaattgacaccctattgtcacaattaaaagaattagagaagcagccgggtgcagtggctcatgcctgtaatcccagcactgtgggaggccaaagcgggcagatcatgagatcaggagatcgagaccatcctggctaacacgatgaaaccccatctctactaaaaatacaaaaaaaaaaaaaaatgggccacacgtggtggcaggcgcctgtagttccagctacttgggaggctgaggcaggacaatggtgtgaacccgggaggtggagcttgcagtgagctgagatcgtgccactgcactccaaccttggcgacagagcgagactccgtctcaaaaaaaaaaaaaaaaaaaaaaaaaaaaaaactagagaagagcaaacacattcaaaaattagcagaagtcaagaaagaactaagatcagagcagaattaaaggagatagagacataaaaaaaccctttaaaaaaatcaatgaatccaggagctggttttttgaaaagatcaacaaaattgatagaccgctagcaagactaataagaaaagagagtagatgcaataaaagatgataaaggcgatatcaccacagatcccacagaaatacaaactaccatcagagaatactatgaacacctctacacaaataaactagaaaatctagaagaaatggataaattcctggacacatgcaccctcccaagactaaaccaggaagaagttgaatccctgaatagaccaataactggctctgaaattgaggcaataattaatagcctaccaataaaaaaaagtccaggaccagatggattcacagccgaattctaccagaggtacaaagaggagctggtaccattccttctgaaactgttccaatcaatagaaaaagagggaatcctccctaactcattttatgaggtcagcagcatcctgataccaaagcctgacagacaacaagaaaagagaatttagaccattatccctgatgaacatcgatgcaaaaatcctcaataaaatactggctaaacgaatcctgcagcacatcaaaaagcttatccaccacgatcaagttagtttcatccctgggatgcaaggctggttcatcatacgtaaatcaataaatgtaatccatcatataaacagaaccaaagacaaaaaccacatgattatctaatacatgcagaaaagacttttgacaaaattcaacagcccttcatgctaaaaactctcaatcgactaggtattgatgggacgtatctcaaaataagagctatttatgacaaacccacagccaatgtcatactgaatgggcaaaaactggaagcattccctttgaaaactggcacaagacaggaatgccctctctcaccactcttattcaacatagtgttggaagttctggcctgggcaatcaggcaagagaaagaaataatgtgtattcaaataggaaacaaggaagtcaaattgtccctgtttgcagatgacatgattgtatattggtctcagcccaaaatctccttaagctgataagcaacttcagcaaagtctcaggatactaatgtgcagaaatcacaagcattcctatacaccattaacagacgaacagccaaatcatgagtgaaatctcattcacaattgcttcaaagggaataaaatacctaggaatccaacttacaagggatgtgaaggacctcttcaaggaaaactacaaaccactgctcaacgaaataaaagaggacacaaacaaatggaagaacattccaggctcatggataggaataatcagtatcgtgaaaatggccatactgcccaaagtaatttatagattcaatgccatactcatcaagctacaaatgactttctgcacagaattggaaaaaactactttaaagttcatatggaaccaaaatagagcccacattgccaagacaatcctaagccaaaagaacaaagctgggggcatcacgctacctgacttcaaactatactacaaggctacagtaaccaaaacaacatggtactagtaccaaaacagagatatagaccaatggaacagaacagagccttcagaaataataccacacatctacaagcatctgatctttgacaaaccagatgaaaacaagaaatagggaaaggattccctatttaataaatggtgctgggaaaactggctagccatatgtagaaagctgaaactggatcccttccttacaccttatacaaaaattaatttaagatggattaaagacttaaatattagacctaaaaccataaaaaccctagaggaaaacctaggtaatgccattcaggacatgggcatgggcaaggacttcatgactaaaacaccaaaagcaatggcaacaaaagccaaaattgacaaatgggatctaattaaactaaagagcttctgcacagcaaaagaaaacaccatcagagtgaacaggcaacttacagaatgggagaaaatttttacaatctactcatctgacaaagggctaatatccagaatctacaaagaatttaaatttacaagaaaaaatcaaacaaccccatcaaaaagtgggtgaaggatatgaacagacacttttcagaagaagacatttatgcagccaacagacacatgaaaaaatgctcatcatcactggccatcagagaaacgcaaatcaaaaccacaatgagataccatctcacaccagttagaatggcaatcattaaaaagtcaggaaaaaacaggtgctggaggggatgtggagaaataggaacacttttacactgttggtgggagtgtaaactagttcaaccattgcagaagacagtgttgcgattcctcaattaccatttgacccagccatcccattactgagtatatacccaaaggattataaatcatgctggtataaagacacatgcacacatatgtttattgtggcactattcacaatagcaaagacttggaaccaacccatatgtccatcaatgatagactggattaagaaaatgtggcacatatacaccatggaatactctgcagccataaaaaaggatgagttcatgtcctttgtagggacatggatgaagctggaaacatcattctgagcaaactatcacaaggacagaaaatcaaatgccgcatgttctcactcgtaggtgggaattgaacaatgtgaacacttggacacaggatggggaacatcacacactggggcctgtcgtggggaggggggcgtgttgaggcatagcattaggagatatacctaatgtaaatgacgagttaatgggtgcagcatgccaacatggcacatgtatacatatgtaacaaacctgcacgttgtgcacatgtaccatagaatttaaaatataataataataatatcaggaaacaacaggtgctggagaggatgtggagaattaggaacacttttcggtgttggtgggagtgtaaactagttcaaccattgtggaagacagtgtggcaattcctcaaaggatctagaactagaactatcatttgaccaagtcattccattactgggtatatgcccaaaggattgtaaatcatgctgctataaagacacatgcacacatatgtttattgcggcactattcacaacagcaaagacttggagccaatccagatgtccatcagtgatagactggattaagaaaatgtggcacatatgcatcatggaatactatgcagccataaaaaaggacacgttcatgtcctttgtagggacatggatgaagctggaaaccatcattctgagcaaactatcagaaggacagaaaaccaaacaccatatgttctcactcataggtgggaattgaagaatgagaacacttggacacagggtggtgaacatcacacactggagcctgtcgtggggtgacgggagccgggagggatagcattaggagatatacctaatgtaaatgatgagttaactggtgcagcactccaacatggcacatgtatacatatgtaacaaaccttcattttgtgcacatgtaccatagaacttaaagtataatgataataacaatagtgataaggtcaggaaacaacaagtgctggagaagatgtggagaaataggaacacttttacactgttggtgggactgtaaactagttcaaccattgcggatgacagtgtggtgattcctcaaggatctagaactagaactaccatttgactaggtatatacccaaaggattataaatcatgctgctataaatacacatgcacaagtatgtttattgcagcactgttcacaatagcaaagagttggaaccaatccaaatgtccatcaatgatagactgaattaagaaaatgtggcacatacacaccatggaatactgtgcagccataaaaaaggatgaggtcatgtccattgtagggacatggatgaagctggaaaccatcattctgagcaaacagtcacaaggacagaaaaccaagcaccgcatgttctcactcataggtgggaattgaacaatgagaacacttggacacagagtggggaacatcacacactggggactgttatggggtgtgaggaagggggaggtatagcattaggagatatacctaatgtaaatgacaagttaatgggtgcagcataccaacatggcaaaaaggaaatataggcaggcaaaaaaagattacaggatttttactcactttcgtcaccctatatctaaaatatgacataatttgttcccaaatatttgttttatgtatcagaggctctgaccatattctgcaaaatagataatttttttctttatttagcaatgtaaggctattctttgcttctaaatttggattacagcagtttttttgtgtaagaatagcatatatttacaacttaaaaatgatcttatttattaaaatgcttatttatcagtttgtcattagaatcttgtttatgattatactacattttatctgaaattatactgcattacaatggatgccagtgattcaaaatagccaccttcaatgagtacacagttacagtaaaatattacagctatctacacgaattctttattaatgctacatcagtgttgcataccagattttatgagtaaacatttcttttattattattttgtagttccatttcagtgttttttttttcagtgttagtttcttaatataagtttattgtgttttttggttttatagttttagacaatttgcaattctgtttgtatacctaagtcagtgtggagtttaagagattaatcagccatattgtctgttaaaatctgattatatgtgtgtgtgtttttaatctataaatatgaccccaattttggttatggctaatcttgtatatattttttcttagctgatttttaatggtgtctttatcttgtctaaatgggtagtcatggaaatagtcttattttcaccttgttataataaacatatatttcctttgtgtgagagaagcacttttgtgacttgaaggtaatttttggagagatttataattctgtatcttcttcagttattcttttaaaaaataattgtacaaacacataacctaaaatttaccatcttaaatctatttaagtgtacatttcatggctagtcgtggtggttcacatttgtaatccccagattttgggaggccaaggcaggaagactacttgagcccaaaagcttgagaacatcctgggagatatgtggagaactcatctctataaaacatttttaaaaatagccagacatggtggtgtggtcctatctacttgggagattgaggagggaggattacttgaacatggaagtttgaggctgcaatgagccataattgtgccgtggaccccagcttgggtcacagagtaagaccctgactcaaaaacactgtacgtttcagacatgttaagtatatttacattgtttttagaaaagacttctagaaattttacaatacacattagacaactaccagtttttcccatttcctggcacttttgaaacaccattctgttttctgtttctaagagtataactgctttatagatctctcatacaatttctgttagttgttagaatatgtcctgcttttttgcaaattgagtaattctttggtatttttatattttaaattatatctgttgaacgatttggtgacagaaatttgcattgcttttacctattggcttttagtaacaatgctaaaataattgtgggtatgcaaatgactcttcatgtgaccatatatgtgagagtttatgtatgtgctgcattctattttattagtctactttttcacctttatactcataccaaattgttttaattctgtaggtttgtaatgtgttttgaaatcaggaactgtaatgcctccaacattgttttattttgtttttaatatttttgggcactttgtagagattctatgtacttgagggattgctgtttttctttcatcaaaaatgcagtgagaaatttgaaaaacattgcattaaatctgtagattgcattgagcaggatggacatctttacaatgttgcctttttcagcctttcacaagagcacgctcaagagtgtattgtttaatttccatatatgtgtgaatttttcaggttttttattttcttaattgttgtatactcatttcattttggtgatagaaagtaatttataaaatttcagttttaaaaaatttggtaagatgacttttttttggcataagaagtggtctatcaaggaaagtgttgtgttagctattgagaaccatgtgtgtcctgatgttgaggagtgttttttatacctgtgttaggaataattgttgcctgcaagtcctctattcccttactaatattcttattttatttttattacagaaagtgcagtattgaaatatcctactataattatgttgctctctctgtgtctctgttattctgtcaatatttgctttatatttgaagccctaatgtgagatacacacacacacacacacacacacacacacacacacacacacgtacatatatacaaatttgttataggttcccagtgaataaatctatttttttttttttttttttgagacagagtctcattctgtgtcccaggctggatggagtgcagtggtgtgatctcggctcactgcaacctctgcctcctgggttcaagtgattctcctgccttagcctcccaagtagctagtattataggtgcccaccaccatgcccagctaatttttgtatttttagtagagatggggtttcactatgttggccaggccagtctcgaactcctgacctcaagtgatccacctgcctcggcctcccaaagtgctgggattacaggtgtgagccaccgtgcccagcctaaatctgtaagttttatgtccttttttgtctccttggagttttgacttcaaatacattttataaaatatgacagtttttgactaagatgtaggttgcataatattattttgatttcttctgctctcatttgattaacacttgcatgaaatgtattcttgcatcgtccccctttcagtgtttttttatcattagatctcaactgacttttgtagaaaaaaaagttggatcttggtttttaaaattttaaatctatttattgaaagtatgtctcttgatttgaaagttaattttatatatatttaaataattttctgaaagagacttactgttttaattattttatttgattcttgcatctttgtttctcattttctcttgtgtctttttgatttttgtattgatatgcttttacttatttctaattcactgttgtgtatctatacagattttttttgtgtgtgtggtgccttgggggttacagataacctctataagaaacaacagtatatttttaatttggtataaaataaacttcagttgaataaaaaattcttcctcattacatctgccctgaaatttgtcattgatgttgccaattatgtttttacattgtatattcattaacagatgtttaatttctgtgcttttatttttcaaattttagagaatagattaaaatattttctgcaccattatgataatgccacaagattctatttttgtgtatgtgcatatctttcccagaaaataatgtatttgtatttgattatgtggtattttctcaaattcttttactttcagtttaaagaactgctttcagcgtcttttatatgtagggcatatgcagtgctaataatatactttttcataatttgttttttttttttggaaggttttttctttttatttggtagggcagatttgttgatggtattattctcacttggtagattttttttttttttcaggactttgactgtgtcacacagtttctttctggcctgcaaaattcttgttgataatttactggttataagactatgtttgtaaatgacacattgcttttatcttgcagcttccaagactttcttcttgtctgtgatttttgaaaatgtgcttataaatgtatttgttataaatatctttgtgtgtttcctaatttgtttgttgaacttcctcatttttacatcatttttttcctacttttaggattttccagttatttatttttctgttttttttacctacaaatttaaaaaaaaaattgtagatactttcgtttttattctcatttttctgattcttttttttttttttttcgtttgagacagagtctcgctgtgtcgcctaggctggagtgcagtggcgcgatcttggctcactgcaagccccgcctcccaggttcatgcagttctcctgcctcagcctcccgagtagctgggactacaggcgcctgccaccacgcctggctaatttttttgtattttttttttttagtagagacgggttttcaccgtgttggccaggatggtctcgatctcctgacctcgtgatccacccacctcggcctcccaaaatgctgggattacaggcgtgagccaccacgcccagcccatttttgtgattttctacactgggccgtgttcctgtttcactcattgaatattattcaatttattatcagtgtttaaaattaatgtgtacatcttttttatggtttctttctgaaatttatacaatatttttgatgagactatattgccttgttttgtatacattgtaatctttgattgagatttggacattaaaaagctacctgtcacagtctttaaaatgtagttttttctgacatagtctgaaaataattatcttggctagagattctgagagtctctcaaacatgttcttaggatgtgccttgtctaaaattttgtatttagtttttagttaaagcagtttattattcatgtttctttcttcttctttttttttttttttttctgagacacagttttgctcctgtcacccagcctggagggcagtggcatggtctcagctcactgcagtctccacctcccgggttcaagtggtcctcttgtctcagcctcccacatagctgggattacaggcatttgaccccatgctcagctaattttgtatttttagtagagacagtgtttcaccatgttggccaggctggtctcgaactcctgacctcaggtgatccacccacctcggcttcccaaagtgctaggattacaggtgtgagccaccatgctcagcctgttcatagttcttcttaataaccaataatcacttgctataattgttacctgtctatgatatcacagtctttctgctgctgtaaaacttatctttcatttcagcagactcaaactgtcatttgaaagaatacctctatttctttcagaactttatgtaatgagggacaggaaccagtgtctgtaaaagcccctaccattcagaaataaagatgtataagccagtattttacttgtcttttaaaaaggaaaccaggaattggcaatttatttctaaagtcactatgttttattgggaagcaggaacatctgtgttgggtaaatggaactgacttttcctctatgtggctgtttgcattgggctcacctggggcactgcacacttaacttactttaatttttcacaaatgtaatttggtctgtatgtttttgttacattatatgtctgtgaaaaagttagagcctgtaatattttgctacttgtgatgtagtttgtataattttataggttagatttgtaaagtatattcatctgtatctagtaagtggagtaattgattatttttatttcttgcagttgtatgttcttattttgcccaagacttttggccaaagcagggcataaaaaattgtttccaaaaagtgatactgaaaagatataaaaaatgtggacatgaaaatttacagttaggaaaatactgtaaaagcatggatgagtgtaaggtgcacgaagaatgttacaatggacttaaccagtgtttgagaactacccagagcaaaatattacaatgtgataaatatgtgaaagtctttcataaattttcaaattcaaacagatataagataagacatactggaaagaaacctttcaaatgtaaagaatgtgaaaagtcattttgcatgctttcacacttagctcaacataaaagaattcatactagagagaaaccctacaaatgtaaagaatgtgggaaagcctataatgaggcctcaaacctttctacacataagagaattcatactggaaagaaaccctacaaatgcgaacagtgtggaaaagcctttaaccggctctcacaccttactacacataagataattcatactggaaagaaaccctacatatgtgaggactgtggcaaagcttttaaccaatctgcaaaccttactacacataagagaattcatactggagagaaaccctacaaatgtgaagaaagtggcaaagcttttagccagtcctcaacccttactacacataagataattcatgctggagagaaaccctacaaatatgaagaatgtggcaaatcttttaaccaatcctcaacccttactacacgtaagataattcatactggagagaaattctgcaaatgtgaagaatggggcaaggcctttagccggttatcccaccttactacacataagagaattcattctggagagaaaccctacaaatgtgaagaatgtggcaaagcttttaaacaatcctcaacccttactacacataagaggattcattctggagagaaattctacaaatgtgaagtatgtagcaaagcctttagccggttctcacaccttactacacataagagaattcattctggagagaagccctacaaatgtgaagaatgtggcaaagcttttaacctatcttcacaccttactacacataagataattcatactggagagaaaccctacaaatgtgaagaatgtggcaaagcttttaacctatcttcacaccttactacacataagataattcatactggagagaaaccctacaaatgtgaagaatgtggcaaagcttttaaccagtcctcaactctttctaaacataaggtaattcatactggagagaaaccctacaaatgtggagaatgtggcaaagcctttaaccagtcctcacaccttactacacataagataattcatactggagagaaaccctacaagtgtgaagaatgtggcaaagcctttaacaactcctctattcttaacagacataagatgattcatactggagagaaattctacaaacctgaaagttgtgacaatgcttgtgacaacatctcaaacatttccaaacataaaagaaattgtgctggtgagaaaacatagaaatatgaataatgtgacaaagcctttaaatggttatcacacttgtttgtaagtagggtaattcatactggagaaaacatcacgagtgtgaacagtgtggcaagacttaaacaatgctcacaccttattgcacaggaaagcctttatacttgagaacaaatgtgcaaatataaagaaagtaaaaaagtgattaatatctgctcacatcttaacatcagagaatttatacttaatagcattaaaagtgcaattactgtcaaaagactcttgagaaaatgtaagcctttaaagtgctgaagaggatttattttgaagacaaacattacaaatataaagagagttatagtaactttacttgtaacacagatcttgttgtattcattttgtattagagcaaaccctgaagcaattactcaaactttgttcaacatcagtgaatttgtattgaagaaaaaccctgtaaatgtaataaatttaggaaaaaaacatttattcaaaaactacaggttagaaaactccagagagttcatagtaaaatatatttttgcagatgcagtaaataagaaaaaaaaatttaatccaaaattgtctatgtaaataccagagaatttacattagaaatatataaggcactgacacttcagattttacactaaatcagagttctgagtttagaaaataatccaaaactaaagttgggagaaaaattatttgtatataactttaaaagagtagaagattttttggagagttataattacattacaagtatactttttttggaaagcttacagattttttaaaaagtaatgtaattaactctcaaattacttcatgtaaataatgttgtaattaactcaaattacttcatgctaaataaattaatttctttcttttttttttttcttttaagacagagccccactctgtcacccaggctggagtgcagtggcgctttctcggctcactgcaacctccgtcttcagcattcaatgattctcctgcctcagcctcctgagtagctgggattacaggcacacaccaccacgcccagctaagttttatatttttagtagagctggggttttgccatgttggccaggctggtctcaaactcgtgacctcaggtgatccgcccagcttggcctcccaaagtgctgggattataggtgttagccactgggcccagcccatgctgtttctcttttcctattgtattcatctgtgaaagcgtatgaccaattgttgctgcatcaaagatatgagagattttttttttaggtgagcatttatgacctcttcaatgaaagagtaaggacattaaaatgtaagatgcatgatgaaaatcttaagtaaagaggttctttgtggttcacttacagtattgagtgatgcatgaggtaggtgttcagagtaatattctgcattatattgagagacgaatatttttagttttagttaaaattaaaataatatattattttactaattgtacttttatgaaacaaaatgcaatacatgttaaaaattttatattatgtgtgaaaatttaattgaacatttttaacgttaaatattgtgcattcaatcaagtcacattattccacttaatttaacctagtccaccttactcaagggtgtaggtaaaagatcgtaacaatacactatttggtaaaataatggactaacatctctagtaatcttttttgccagtggctttaaactgcaaataagttaaggaatattgtttctgtaggtaaaatttttatttttttcccatttaaatttacttttgttaatttttgtgggcacataatatttatgttatatatggcatattctgataggcatacaatatataatttatactaataatcacattaggataaatgacgtatccatcacctctagaatttattttttgtattacaaacaattcagttctacagttttagatcatttcaaatgtataattaaattgttattgactacaggtttatttttataataataaaaattatatacaattataaacaaaatttacacatttttgagtcctgaataaatactttaaaaaatttcttatatatttttctttgaatatgtggcctctctgcttgcaaacacatacagacttttagttttgatttacatagagttaaatgtacacatctgttagtctaaatataaaccttaggtgtaagaaaattaataaggtgtctaattttctttttgattcttttttttgacagagttttgccctgttgcctaggctggagtgcagcggtgtgatatcggctcgctgcaacctctgcttcgcagggtcaagcaattttcctgtctcagtctcctgagtagctaggactacaggcccaggccaccacacctggacaatttttgtatttttagtacagacagggtttcatcatattggtcaggctagtcttgaactcctgacctcaggtgatccacccacctcagcctccgaaagtactagaattacaggcatgagccaccatgcccggccaggtgtccaattttctagaaaacaaaaatcttcaaaaatgtgaatgcaaatttctgctctctgctttgttctgaatttattactgtacaatcttatggcttatgattcagaatcttgccatgcaaattctgtttttacttgcctggtactcatgctaggcccataactttcttgtttcttatataagttttttgttttatggtttatgaagttttcattatgtgagctgctctgtgattatatgaatgattttaatgaaattgagtcatggaccgggcgcggtggctcacgcctataatcccaacgctttgggaggccaaggtgggtggatcacttgaggtcaggagttcaagatcaacttggccaacgtggtgaaccctcctctctactaaaaatacaaaaattagccgggcatggtggcgtgcacctgtaatcccagctactgggaggctgaggcaggagaatagctttaacccgggagacagaggttgtagtgagctgagattgcacctctgcactccagcctgggcgacagaggaagaatccatctcaaaaaaaaaagaaatttagtcatgcacacaaaataatttttacctgtaattctaaaattagtttgttaaattatattttatttagttggaacattccattttgttcttttaattggagaaccctatataagcctccttttcttaagttactgtttttttcactttttataatggatataaataaatttattcattgattgggccaatttgttcaggtaagtactagggaagcttcataagtcatgaaaatgtttttatacctaaatgtagcaaacaaacatgacggtgcttgctgtataacagatgctccataataaggcataaatactcctgtgaaacttgcaacttcatgttcagaggtagaaaatatcaaaggtaaacaattgattcttcatgtggcgagtacttttttttcaggctgcaaagctgaattttgctgaatttaaaaagaagttctgcttcatttattttctaattatcttaagttttgtttgtctttttatgtgtattccacccatgtatgcatcatagcccttcttcttcttctgtgttatggctacagttttcccactgttttcttcatgccatgtcatttcatacggtgttttgtgggttttgatgagaactgtgatattttttaatgcactgaaaaattggtttcaactggagagtttgcttatcaatataactttcagatcagttaattaagataaaaggcatacactgtccacaggagagaggattaaatcggttagcatggtgcttctttctttgtaaaaagaaaaagtattgtttgtaaaaagaaaatcatactagattcttacccaaagtgtgacaaatataaaatttgctagaaaatatatcatagaaattaaaattttaagagagtttatggtaagtaaaccatattaaatttaattttttctttttttttttttaagacagtctcactctgtcacccaggctagggtgcggtggcacaatctgggctcactgcaacctacatcttccagattcaagcgattcttccgcctcagcctccctagtagctgccccaagcttaaaataaagcactaaagtacattggctcctcccatgcactgtgctgggtttaaaacatgctgtcaagcctgggcgcggtggctcacgcttgtattccgagcactttgggaggccgaggagggtggatcacctgaggtcaggagttcaagaccagcctggccaaacatggcaaaaacgcatctctaatgaaaatacaaaaattagctgggtgtaacagcacactcctgtaatcccagctacacgggaagctggggcaggagaatcgcttgcacctgtgaggcggagattgcagtgagcagagatggtgccattgtattccagcctgggctacaagagcaaaactctgtctcaaaacaaacaaaaaaaacaaaacaaaaaccatgctgtcaagtatcaaaattcctgtggttatgactgacacatgataaaacagtacaaaaactattttttatactattcagccaagtttatgacaaagacacagacattatttgaaatactgttatctttctataaggttttagaaatgtattctctaacttgaaagagaaaatgtgtatttattctgtaaaacagcattttgaagtatatacaggtggtcagatgcttattagctttatgtaattaatgctttatctcaaatagttaacattttgatggtgagattacataacattgtcttagcattttttcaaacataacaaatgcaatattataaactatagtcgcaatgccgaacaatcttgaacttattcctcctatccaactatatgtattatttggcagatatctttcgaattcccccatttttaaaaataccttggcatctagtggtcaccgttttgttctccacatcaatgagattaagtttttttgaatccatgtgtaagtgaaatgagatactaatcattttgtaactggcttatttcaactaatataatgtccttcaggttaatccatgtgattgaaaatagaattttcttttaaatataaatagtattccattgtgtatatatgccatattgtctttatttacttattagatgttgaactgttgattgcataatttggctgttgggaagagtgctgaaagcaacatagaagtgtgaatatttcttcattctgattttgttttgaatacatacccaacagtgcaattgctgtattatatagtagtttgattttaagtttttttgagtaatctctattttgttattcataatggctgtcctcatttacattcaaaccaacagtgtgtaagcattttcttttattgacatctttaccaactaacacttttttcttttatttatttatttacttatttatttatttatttatttttgagacagtttcactgtgtcacccagcctggagtgcagtggtgcgatcttggctcacttacaacctccgcttcccgggttcaagcaattctcctgcctcagcctcccaagtagctgggattacaggtccctgccatcatgcccagctaattttgtatttttagtagagatggggttttgccatgttggccaggttggtctcaaactcctgacctcaggtgatccacctgccttggcctcccaaaatgctgggattacaggcatgagccattgcatccggcccttttttttttttcatttttagtaagcgtcattctaatgagtgagttgatatctcatagtcttttctggcttgctttccctaataagaattgacattcggctgggcgcagtggcttacacctgtaatctcagcactttgtgaggccaaagcaggcggatcacctgaggtcaggaattcgagaccagcctggcaacatggtgaaaccctgtctctactaaaaatacaacaattagctgggtatggtgacgcatgtctgtaatcccagctactcagtaggctgaggcaggagaatcgcttgaacccatgaggtggaggttgcagtgagacgagatcgtgccactacactccagcctgggtgacagaatgagactccatctccaaaaaaaaaaaaaaaaaaaagacattcagcatttttaaatgtatctatttgccatatgtatgtattttcttgaaaaatatgctttttgctttttttttttttttttttttttttttttttttttttagatggagtctcgctctgttacccaggctggagtgtagtggcgtgatccctcagcctcccaagtagctgggactacaggtgcctgccaccacgcctggctaattttttgttttttagtagagatgaggtttcaccatgttggccaggctgttctcgaactcctgaccttgtgatctgcccgcctgagcctcccgaagtgctgggattacaggcgtgagccactgtgcctggccagctcattttcaatagttatttgttttatgttgtatagtcatttaattttcttatatatttttgatattaataatgccttgtcccattttttagttattctgttgattgtattctatgcagcagcattttaatttgaagtattctgactcatttatttttttccttttgttccctgggattttgagtttaaatgttaatggggccttctctctggttttttttttgttcttgttgttgttttttgtttgtttgtttttgtagtagtaatggtagtttcagagtttcaggccttacatttaaatatctaatttattttgagtggatttttatatgtggtgtgagttagggtctccttttattgctctgcatttggccataaagtattctcaacataattttctgtctttttcctacgaaattgtcacctttatttaaaatcagttagctgtaagtacatggctatatttctggaatctttttttttgctccattggcctagtgtctgtttttattcaagcaccatactgtttttgttactgtacttttgtagtatatttcaaagtcaggtagggtgatagattcacttttttctgttagattgctttggctattgagggtcttttgtggtacaatatacattgtagatgtattttttaagaatttttattaagtatgtcactgatattttcattgaggttgcattatatctttaggttattttgtgtaatacaaatatttaacaatattaataatggcaattcattaatgattaactttttaattcatgtattaatttcttgaatgtttttagagtataatgtaaagtgcttcaaaattttgattaaatttattttaaagtatagttactacagttactgtagatggaattgttttttaaatttattttgagatagttcatagaaatgctactgacatttggatattggttttgtattccacatgtttaataaatttattagttttaatagtttttggtaaagtcttaggcttttcttaggattatgtatagggataaaagattattttttattatttattattttttgagatggagtttcactcttgtcacgtaggctagagtgcaatggtgcgatctcggctcactgcaacctctgcgtgccgcattcaagcaattctcctgcctcagcctcctgtgtagctgggattacacgcatgcgccaccacacccagctaatttttgcattttcagtagagatgggtttcaccatgttgtccaggttggtctcgaactcctgaccttaggtgatgcacctgcctcggcctcccaaagtgctggaattacaggtgtgagccacagcacccagcctgagataaaagattatcatacaatgataatttaactcctttttttccaatctggatgcctttgattttattctttattttctatgtcttggacatttagtactatgtttagtaagactgaagaaagtgcacatccttgacttgttttagctcttagagtaaaatcttacagcatttccctattcagtatgttaatacctgtgcattttttgttatatttgacatttattatcggaattaaccagacaaatcgctccaccaactaaacgccacttgtccctctaagaagttgggggacgccgaccgcaatctcaactcactgcaacctccgcctcctgggttcaagcgattctcctgcctcatcatcccaagtagctgggactacaggtgcctgccaccttccctggctaattttagtattttttagtagagacgaggtttcgccgttttggccaggctggtcccgaactcctgacctcaggtgatccacccgccttggcctcccaaagtgcccaaagtgctggcattacaggcgtgagccactgcacccagcctaacaatcatttttaataaaaattaacacattgaataattgaataattttcattgttgtatatgtgtgtaaatgtataaaatgatacttgaaaaaaataagccagaaaaagtatgttaatatttgtaataaaatgggaaggtagttaattattatttgcaaatgatatcttttgtttacttagataaaaaaagaaactataagactattttaacagtctattcaggtgggtagacaaaattctaagatgatcgccaggattcccaatctgttgcacacctgctgtgtaatcctctcctttggcgtgtaaagaaaatatgacttactgtcgtggaaaatcactcatgaaattaggttgctgatgtattgactttgtgttcatcaaaagggagattatcctgatagggctaaacttaatcagaggtgcttttaagagaaagacacgggccgggcgtggtggctcacgcctgtaatcccagcactttgggaggccgagacgggtggatcacttgaggtcaggagttcgagaccgcctgatcaacgtggtgaaacccatctctactaaaaatacaaaaattaaccagttagccgggcgttgtggcatgcgcctgtaatcccagctcctcaggaggctgagatgggagaatcacttgaacctgggaggcagaggttgtagtgagccaagatcacaccactgtactccagcctgggcgacagagcgagactctatcctccccaaaaaataaaaagacacattgtagaaaaacacccttgctggcctggaagtaagtgacttctaggtggaacaggttgtaagctgctcttggtggccacatggcaggaaacacgtttgtatattgtcatcattcctgccttccacatgttgcttccaatagggaggatcccaggacagagataaaaagggggtcttcttcatgcaaaaataatcacctctcatctgggatagcctaagataaacagaggagaccacaacatgagcaaatcaatgggaggaaaagggcaacctggttgaaagggctcactggcatgatggagcagcatttactaagttgtagtgaatgatcagcctctgggatagcaatagtcagccaaggaggctgaactcatttttattctcattaaatcagcatatctgcaccattctggtggcccagtgttacactacccattacaaaaataacacggagaccagtgggtaacttcctagaattgagcttatcatgaaaaagcatatctcattatttgttttcacaattgaaaagcctcgaaaacaatgaatttattaataatgaacttctgctcattttagaggattctacgttgtcatgtattaaactttaaacactttaatattaatgtcttgaatgcataaactatgcagatagtttaacacgataaaagtaacaattagaaaaaaacatttgaaatgggatagaatttatcaaaatcacatcttttcaatggcttggcataattgccgtgctttctgaagtggctagattattaacaagtagcaaagacaattttggttttgttcaatcattaagttcttgaccatttaaaatctaaaattctggctaaaggatttaaaggccgtattctttagtggcttcttagggtttcacaggcaatacaaaaagaattttgataggcagaaaaatgcattctacatatatacacagtgctcttctctagtttgcattaacattaaaagattgaagatttcaaatctagtctgtcagagtaaattgataaaagttgtatttttcagctaagcaaataattgaataaaataggtaacaatttgtcattagctgccaaaaaatagtatgaccagattcactaagtatctagccacgcaaacgacagcccaattaagtcaagatcctaacaggtgcgtgtggaaagcatttatgggcaatgtggtgcccctccactcagcaccttcttctgcccctttacagagatacaatttcccgagtgactcagggtgaatactaggagctgagaatgctgtattcagtttattaccgggaacataatcaacaaatttatttcatattataaaaattttatgaatcagtttggtgtggtggctcacacctgtaatcctagcactttgggagtcctaggtgggtggctcacaaggtcaagagatggagaccatactagacaacaaggtgaaaccccgtctctactaaaaatacaaaaattagctgggtatggtgacacgtgcccgtattcccagctacttgggagactgaggcaagagaatcggttgaacccgggaggcagaagttgcagttagccgagatcgcgctgcttcactccagcctggcgacagagtgagactccgtcccccccgccaaaaaaaaagaaatgaatactactctgcctcacaaaggcttttagtaaaagattgcatataatactcaatttggattcataaaaatttcaatattccaggtaaatcagcagcacttaaatgtcaaccaaatttcataaaacatatttcaatgagataagtctttttagctaagaattttattttattcgtaaatttagagaaaaatagaaaaccagtactttgagctaaataacagtgtttggcatgagagcaccatccaaacaagtgctcttcatgattaacatagcaatggcaccatgtgctctccttgagcaggccggcctgtttccactgatataaagtggagacggcattgaaatagtgagcgagggtgatataaatggaatatttatattaaatacagtttttaataaaaagcatttgatgttgtacagctacagatgaaattattagtatgaggccgtaatatttttacttctactgacaggataacttgattcacaatattcttatttcaaataatattcctttttttgctgtatatttgctagcttttggtccaaatattaccggaactcaatagaaatcaacaaaattcatctttattttaccacaagcattttgttattgatgcatatgcttattttgcttaaaaatccattagcttttgatgaaagatttgtacttttctttcagtgtgttgtttattgctgacaagtggctgtcctgccaggaaactgctgttctcagctctatccacactgacaaatagtgagtggaagtgaagtgtaagtaagaaccaaatgtgtcttctcttcatcagttttttcatccattggctgaaaaaagagaaagatgcagaaagatgaaagaagatatgatccctgaaagatcacatagaagtcctcttaatgagaaaaaaatggttgtgtgaccataaaatacattattttgctaagcctctgaaattttaatatacaacttgcattgctttcagtccttcagttttgatgcttcaggatatgacacaattccctggtgaatcaaaactgaaaagaataatttattaaggtaagagatacaggaaagacctcttacatttgaccaatatctccacccccagcctttttttttttttttttttttttttttttttttgttgagaaaaactttcgttcttgtcacccaggctggcgtacaatggggcgatctcagcccacggcaacttctgcctcctgggttcaagcgattcccctgcctcagcctcccgagtagctgaaattacagtcacgtgccaccacacccggctaattttgtatttttagtagagactgggtttctccatgttggtcaggctggtcttgaactcccagcctcaggtgatccacccacttagcctcccaaagtgctgggattacaggcttgagccactgtgcctttttttttttttttttttttttttttgagacggagtctcactcttgtccaggctggagtgcagtagtgcaatcttggctcactgcaacctctacctcccaggttcaagtgattctcctgcctcagtctcccaagtagctgggtttacaggtgcccaccaccccgcccagctaatttttgtatttttagtagagacggggtttcaccatgttgcccaggctgttctcaaactcctgatctcaggtgatccacctgcctcagcctcccaaagtgctgggattacaggtgagtcaccacacccggccgagttagaatttttttctactctacctagacatgagatcatgtggctcttccgagacattgtctgcaggcactcagaatggtccagcgtttgacataccaatgtaggcattcctacagtacagcctctaacaaaagtaggctgttccgaacccctggtaatagaatacctttataccaagaaggttggaaaagcatcaaaatctgcttgtggcatgtgcccaggcagacttcgaggggttcgtgctgtaagacttaaagttcttatgaaattgtccaaaacaaacaaacatgtcagcagggcctatggtggttccatgtgtgctaaatgtgttcgtggcaggatcaagcgtgctttccttattgaggagcagaaaatcgttgtgaaagtgttgaaggcacaagcagagtcttctcactcattttatttagctttgcagctaaataaaaagtgaaacttttttgagaaagaaaaaaaaatgagatcatgtggtatgtttttgttttcttttttctttgtgctggctcttttttttagtatttattgatcattcttgggtgtttctcacagagggggatttggcagggtcataggacaatagtggagggaagatcagcagataaacaagtgaacaagggtctctggttttcctaggcagagggccctgccaccttccgcagtgtttgtgtccctgggtacttgagattagggagtggtgatgactcttaacgagcatgctgccttcaagcatctgtttaacaaagcacattgtgcaccgcccttaatccatttaaccctgagtggacacagcacatgtttcagagagcacggggttgggggtaaggttatagattaacagcatcccaaggcagaataacttctcttagtacagaacaaaatggagtctcctatgtctacttctttctacacagacacagcaacaatctgatttctctatcttttccccacctttcccccttttctattcgacaaaaccgccatcgtcatcatggcccgttctcaatgagctgttgggtacacctcccagacggggtggcagccaggcagaggggctcctcacttcccagcaggggtggccaggcagaggcgcccccacctcccggatggggcagctggccgggcggaggcgccccccacctccctcctggatggggcggctggccgggtggggactggcccccacctccctcccggacggggcagctggccaggcgggggctgccccccacctcccggacggggcggctgccgggcggagacgctcctcacttcccagacggggtggctgctgggcggaggggctcctcacttctcagatggggcggccgggcagagatgctcctcgcctcccagacggggtcgcggctgggccgaggcactccatacatcccagatggggcggcggggcagaggcgctccccacatctcagacgatgagcggccgggcagggacgctcctaacttcctagatgggatggtggctgggaagaggcgctcctcacttcccagactgggcagccaggcagaggggctcctcacatcccagacgatgggcggccaggtagagacgctcctcacttcccagacggcgtggcggccgggcagaggctgcaatctcagcactttgggagtccaaggcgggcggctggaaggtggaggttgtagcgagccgagatcatgccactgcactccagcctgggcaacactgagcactgagtgagcgagactccgtctgcaatccccgcacctcgggaggccgaagctggcagattactcgcggttaggtgctggagaccagcccggccaacacagtgaacccccgtctccaccaaaaaaatacgaaaaccagtcaggcgtggcggcgtgcgcctgcaatcccaggcagtctgcaggctgaggcaggagaatcaggcagggaggttgcagtgagccgagatggcggcagtacagtccagcttccactcggcatcagaggaagaccgtggagagggaggaagagggagaccgtggggagacggagatgagggagagggagatggagagctgtgttggctctttttacttaggctaatgtcctacaggttcatcagtatcgttgcagataacaagatttctttatttttaagggctgaatagcattccattgtgtaaatacacgaaattttcttcatccattcacctgttgacacttaggttaacacttaggttgattctctatcttagctattgtgagtaacctacttccttctccttcatttgttttcatatctttttttttttctttctaaaagtattttaatttaaaatacaaattttgactgttaaatgccttcatttttctgccttcttttggataatattttggctaattttaaaaataaattttttaaaaagctcttgggggccaggcaccgtggctcacgcctgtaatcccagcactttgggaggccgaggcaggcagatcacgaggtcaggaggtagagaccatcctggctaacatggtgcaaccatgtctctactaaaaatacaaaaaattagccaagcgtggtagcacgcgcctgtaagtcccagttactagggaggctgaggcaggagaatcgcttgaacccgggaggcggaggttgcagtgagctgagattgcaccactgcactccagcctgggtgacagagtgagactccatctcaaaaaaaaaaaaaagaaaaaagaaaaaaattcttggatcaaggttattacttcattattaacataatttgagacaaaatagcgataaaaataaacattgattagtgaaacaacaattgtctagcccctggtaatcatttcctctctcacccaacatgaaagctgtatctttgtgtcatctctcccagttgtgagaaagacgtttctgattaaattgtttggcataaaattttgtaaaattttactcttttggtgtgaaaatcaaactgctctattactagaaaagtttaccttttgataagtataattttactctattctatttaaattcttcagaaaatcctgacatagaatgcacttaaatttttttgaaaattaaaagtgcttaaacattttttatacaaactaaaaataattttagattcttagaaaacatctttcaaatactttaagttaccttcctctgacagtactttttttatattgctataacacagcttttctgtcctttgtggccaactctgtcacttctatcctatttagttgtgcagtatttatgttttgcattttacatttttttaaggttatagattaacagcatcccaaggcagaagaatttttcttagtacagaacaaaatggaatctcccatgtctacttctttctacacagacacagtaacaatctgatctctctttcttttccccacatttcccccttttctatttgacaaaaccaccatcgtcatcatggcccattcccaatgagctgtcgggtacacctcccagacggggtggcggccgggcagaggggctcctcacttcccagatgaggtggctgggcagaggcgccccccacctcccagacggggcagctggccgggtggaggcaccccccacctccctccgggacggggtggctggctgggcgggggctgccccccacctccctcccggacggggcggctggccgggcgggggctgcccccacctcctggatggggcggctggccggacgggggctgccccccacctcccggacagggcagctgccgggcggaggggctcctcactttccagacagggcggctgctgggcggaggggctcctcactttccagacagggcggctgctgggcggaggggctccttacttcccagatcgggcggctgccaggcggaggggctcctcacttctcagacggggcggccgggcagagacgctcctcacctcccagactgggtggcggtcaggcagagacattcctcagttcccagacggggtcgcggccgggcagaggcgctcctcacatcccagacgaggcgacgggtcagaggcgctccccacatctcagatgatgggcggccgggcagagaggctcctcacttcccagatgggatggcggccaggaagaggcgctcctcacttcccagactgggcagccgggcagagacgctcctcacttcccagacggggtggcggccgggcagaggctacaatctcagcactttgggaggccaaggcaggcggctgggaggtggaggttgtagccagctgagatcacgccactgcactccagcctgggcaccattgagcactgagtgagcaagactccgtctgcaatcccggcacctcaggaggccgaggcaggcggatcactcgcggtcaggagctggagaccagcccggccaacacggcaaaacccagtctccaccaaaaaatgcaaaaaccagtcaggcgtggcggcgcgcgcctgcaatcccaggcagtctgcaggctgaggcaggagaaatcaggcagggaggttgcagtgagcggagatggcggcagcacagtccagcctcggctttcacaactttggtggcatcagagggagaccgtggagagggagagggagaggacattttacattttaaaagttgtaattcatgcaatgtaattttcaaacagttgaccaaccttttttcatgtgaaactctgcttaatcagcagtcactttatttttactcttcaagggcattttcattccctgaaaagcagagcgaaagttcaagtgagtgtgctgagctggtcctcgccagtgtcagtttattcacattcacacaggtgaccttctggggaaagagggttcatttcaacagccttattacaggaatgtggaacagatttaatagagtaaaatgtaaatcactgactttcaagaaaaaaagaaatttttttttattctttgtatgtgagtatgtggtggttgtaaagtttacaataaagactaaagttagagagcacactttacatgaggggtacagtgcaggtcctatgcaaccttctttttgccaaacatgcccttaatgcttttttcaagtagtatgttgctgtatccatcacttatcaggctctgatgatcattttctaatttatcaatttaaatatgcagtcaatatcatccagagttctgtccttgacgtttaactgctcagacataaaactatttaaatattcttgataaaagatgaggttttatttattttactacagagcatttcatgccagtaagcttaagtttcatgaaacttgaaaacatgctttagttttaccttcgtttggaaagccaaatttggccaaaaatgaatacaacaataaacttgaatataaatcattttgaaattgaattcaaattattaaaatattaaaattgataaatgtatttgactatgtgtcaaattattaaaaatttttgaataaaaagtgtaataaagttggaacttgagaaatatgcatgcttttatgataaatcattttgtgattaaagtttcaatttagcagttttgactgttgaaaatgtgaatactgacatatcagagaagaaaatattgataacaaagaatacaaaacaaagcacaatagtgttgatagctgtggtgagtcctcagctcttgtcttagtttcaaaaaatttaaacaagacaaaccacaaagaagatgcagcataatttattgcaaaggagaaagactattttaaaagttagatgcagaatacccagtacacgctgagcgagaagggattcagggcgggcagcttacaggaatgagacgaaaagactagaactaggaacactccatttatgggaatcttacataattattcataaggaggtggaaagaggtgttaactggtaagcatgttctgggtggtcctcttggtgcacatacacagtggctgtacatgcttgtttatatgtcacgtgttattagcatcttaaatctcaaccacggtgtgttttttactatttataatagtaataatgagtaaaaggtcactttaaggacaggtaaaatcaaaatgtgcatgctctctacaagggtatttccctacatgagagagctttgcttgaatgagttgaaatacgatgcaaatgctggggcttactgggttgacaatatgcagttgccatgcattcaccgtggttgctgcatcccgaggacattatcagtatgccaacgtggtatactgtagtagtcactttcttgaatacccatcctgcctcaatagtacttgtactgatttattcccaacgactgactccgagacttaagatttagctattatatcaacattgtcaacagtaggaaaatcaaaattttaaaatcaaatgtatttgagtttgatttgggtaattagctgagtgcccaggaaaaattattttacatttctgaagcttcaatcttcattattaataaaaaatattatctccctcagggctgttttaacacatggtagctataagtatttttaactgaaagtcttgtgtaaatattatagtaaatatttaagaataaatattcatatttcaaagattatgtgagttggtatattttgtcatgtttaatgtatttatcctttccagaaaatgccacagtaagaattttttattttctctggaataaaagactaaggttttctacattgtgactgtgctgatatttgcatagggttttgactgttactgttgaatttaggttgaatttcaaatccactgttgtttagcttgtgtggtttctggttcatttggagaaccaaatatattagacgtgaactgtttggagtaacttggcatcatttcagctgtccttctgttattacatctggggctttagaaatgactaggattcaaataaggttggtttggaatcaagcaatagaaaatccccccaaatactcagggaaatagctactgaataatgcctttcagtgagatttatacatgaaacagagttcaatgaaattcaaaaattattgcaagttttctaaatttagaaactgactgcaaacaacatattaggcacttgtagcttgtctatagcatctgtagcctggggaagctgacattacagaaaagcatattgctactgtaataagatttggaacaaaaacttacgtgcatgtaaacattcccccttagtaatccttaaatacttgtcattctggctcaatctttttggtgcaactgtttatgatttcagagattctatctcaccaatttcaagctatggtgttttcagctcttaatgtttacttgtacccagtaagcttcatggttacatcattatattggggtcccccaggcaatccctgaggcttagagctgaccatcctacctcatcttttttgcttcacatgctgttattgagtccctttcactccatatttgagccttaatgagccttccatttaaggaaaccagaagaatgggttgcccatatatgttgagttgagaatcaggattctcttgagtataaagactttacggccgggcacggtggctcacacctgtaatcccagcactttgggagaccgaggcgggtggatcaggaggtcaggagtttgacaccagcctgaccaatatggtgaaaccctgtctctactaaaaatactaaaattagccaggtgtggtggtgcgcgcctgtagttccagctgcttgggagactgaggcaggggaatcgcttgaacctgggaggcggagatttcagtgagccaagattgccaccactgcactccagcctgggcaacggagcaagattccgtcaataagtaaataaaataaatagactttacatttattcatagtacaaagcagtatttttttttttttaatatggagtctcactctgtcgcacaggctggagtgcagtgtcatgatcttggctcactgcaacctccgcctcctgggttcaagcgattctcctgactcagcctcccgagtagcgtggactacaggcgcatgccaccacgcctgactaatttttgcatttttattagagacgggtttcactatgttggccaggctggtcttgaactcctgacctcgtgatctgccggcctcagcctcccaaagtgctgggattacaggcgtgagccaccacacccggccacaaagcagtgtttttaagatgtgaacatgttttactcaaattaaatataaatgattttatcagtattccaatgtggtgaaaataactgcatgaagttcaccaaatgttctgcttcagactttttcgaaacaaagatcaatatgtatgcactagtggatattagttatttggtgttggttttcatttttaaagattttttccctactttatgctgatgttaagctacacaaagcataccaaaagctataatttaccacactttttaccaaaatttcaaatacttaaatattgaaagtgatattcttgattaccattttttatgtgatgtagtctgcatttattagtactacattgcatttttttatgtggtgccaggttataaaaatgccttccagctgatttcttaggtaacagtagaatctgttttcttagacagtaacatgagaattctttgtatactacctttggaggtactaaaagcagctggttaaaggtactgaaatctgtccttattaatggaaatttaattcaaagactatgcaaagaaaagtcattcaggcaccctgaaactaaattggaatctggttcctgacactgattaacagattgagcagattagagtggacctacgtccctttaaacaatattgaaacacatttttttttgagacagcgtctcgctctgtcacccaggctggagtgcagtggtgcagtctcagctcactgcaacctccacctcctgagttcaagcaattctcattcctcagactcctgagtagctgggattataggtgcctgccaccatggccagctaatttttgtatttttagtagagacagggtttcaccatgttggccaggctggtctctaactcctgacctcaagtgatctgcctgcctcggcctcccaaagtgctgggatcacaggcgtgagccaccgcgcccagccagatttgattttttaaatgtttgtgaatgtgtatcactgtagtgaaaaatcaaattatttaaatctactttctaaataattttgattaaagtattctgtattttgagtgccagtattcatatagtatgccaaatcacccatttgtttactattttgccattttataaaataagcctgaatttgtggagacatttttaaagaaaccgatcttttctacaaaaagatttagacatcgaaaatagagaatttagtttcacattatatatatagtttgctgaaccctacagtaatttgtaaagtttgtttgtgtatgccaatcttagattttctaaaacaaaatgaagggtttttgttttatgttacatttaatatacaaagtccaaaatatgctcagacagacaacttcatcagactccttcatcaactccgtttccatcgtggcgtgaacggtttctcactgctttagcatctgcctttgatttctactaattttctttgactttgatttttcttgtccatctctggtggttgctttgctgctccactttgaggagttcgggcagcttcaccctcagccgctccaacagtccgtccatttggctcaagctctaggcagtttctcctggttcttctgttcctggcgtctgagatttgtcagcagggccagattttcaggaaccatgcatggctatcgcctcctcccgcctggagggctgctcctgcgcctctgaccggcgctggttccagccgcggcccagctgagcacagcaggaaccgcagtagcagccggagcgcccacgcccggggtcgcctagcccaggaacgccttagttgcaaccctgcgtcgaggcccagctccgtgcgcagaaagccgaggccaaccagagcatttcctggacgagtcctctcggcctgcggggccagttcctcctaccagcttcctgctgccacctcggcttccatcagagggacgcttaggatggcgcaggggcccggagacactgtgaagagtccaggggaatgaggaggggctgggccgggcagcctcaggcccagcgcaggttagcgcttctcacgcctgagcagagatcagctactgccactgcggggaggacagaaggacccaggctccccagcctccctctgcaccgggagtgtaggaaactatttaaaaataataataataataataataataagtatggaatagaacttgcagatctaacccaaccaagttttcattctttttccttttccttttcttttttttaatgtatttttctcttatattatgctcgcctgacggaagattttatgttccatcctcacatggaaatttaaatgtaatcataatggtcacaaatttagaaacagtatttactttattttgcctaagaatgctggggtaacattaatttttcaatggtgccttctgaatcttaacgttgattaccttttatttgagtctattaactaaactgtagtaagtaataataataaattcttgatttgcatagggcttaacagtttacaaagggcatgtattcattcgtttaaccgataaatgtgcgttgagctacacgttgtgctatattttttgctagccttgggagataaaattaataaaagaaagtattggccgggtgctgtggctcacgcctgtaatcccagcactttgggaggccgaggcgggcggatcacgaggtcagaagttcgagaccagcctggccaacatagtgaaaccccgtctctactaaaaatacagaaattagccgggcatggtggcacgcgcctgtagtcctggctactcaggaggctgagtaaggagaatcacttgaacttgggaggcggaggttgtggtggtgagccaagatctcaccactgcactccagcctgggcaacagagcgagactcaaaaaaacaacaacaaaaaaagaaagtgttgatctcttctctcaggaaactttcagtctggcttcataaaatcctcacacactctcataaagtctcttaagtcttctataagcctgctaccccaaagtgaccactatctgaattttgtgttattcactttatgcaattttatgaacaatatacattttagtgttgcctgtttcttttttttgtatatatatgctagcattagttttcatgtgtgccttttttaatttatatgtatattttcctatttttccatgttgctttgcatagcaacagtgattttatgtacctttggaagcagtattgtatgtatgtttcctgggttagaccagtgtcttcaacggttagaagagcaggctcagacagcctgtgtaacgttgggcaagtatcttaacctctctgattcctctgttacttagagataataacatggcagtgaaatccgtgttgttctttgaatgtaataataaagtaggtaaagttatattaagaacaataaaaacattacaaaagacaaaagagtatttatagatacattcaagacttaaacataagataatattttaaacaattttatgttattaaatttgaaaatttagataaaactacctttttttttccagaaaactatgtgacaaaaactgattaaggaagaaataaaaaagataaatagaaaaattggccgggcacagtggctcacacctgtaatcccagcactttgggaggccaagggaggtggatcacgaggtcaagagatcgagaccatcctggccaacatggtgaaaccctgtctctactaaaaaaaataaaaataaaaaaataaaaatttaaaaaaattagccgggttggtggcgggcgcctgtagtcccagctactcaggaggctgaggcaggaaaatcacttgaacctgggaggtggaggttgcagtgagccaagattgcgccactgcactccagcctggtgacagagcgagactccgtctcaaaaaaaaaaaaaagaaaaaatgttgtttttaattttacacacctaaaaagtacatgtattataaaagaacagcttgataaatgtttacaaaagatatataccatgaacccagcacccagcagtggaagagtatgaacaacctggacactccccctcctttattctcctttttttttcttttcttttctttttttttttgagaagaattctcgctctgttgccccaggctggagtgcagtggtgtgatcttggctcactgcgacctctgcctcctaggctcaagccattctgccttagcctcctgagtagctgggattacaggtgcacaccacaacacctggctagtttttgtatttttagtagagacggggtttcaccatgttggtcaggctggtctcgaactcctgacctcatgatctgcccgcctcagcctcccaaagtggtgggattacaggcgtgagccaccgcacccagctattctccttttcaatcactgttctgccaacagaaacttatatcctggctttttatacaataaataatatttgtctgtttttgaactttaaataaatagattaatacaataagttctcatttttggccagcttcttttgttcaacattgtgagattaatctctgttgctgtctgtggtttgcatatttattgatctaccatgtgacatcatataaatacactacaatttatttattcaactgttcatgaacattttgttaaatttccagatttttcagtgcgtctatagaccatcttgtgctttttttttttttttttttgaggtgtcgcccaggctggggtgcagtggcacgatctcggctcactccaacctccgcctcccgggttcaagcaattctcctgcctcagcctcccgagtagctgggattacaggcatgcgccaccacgcccggctaattttgtatttttagtagagaaggggtttctccatattggtcaggctggtctcgacctcccgatctcaggtgatctgccacctcggcctcccaaagtgctggcattacaagcatgacccaccgcgcccgcttgtgtgcatttttaaagataaatttctgcaattatgtagatattttaccacaaatataattaaaatatatttatatcttcagcttgtgtaggcattggcaagccctcttccagaatgtagtaccaacttatactaccagcactacaggatggattatatattatctaattgtctttattttctaaaccctacagtgtaaactttgtgaagtcaaaggcctttaatttcattcaccataatatttgcaatttttaattaaatgaattttatttgactttgaagcattttcttttttttttcttttttttttttttgagacagagtctcgctctgtcacccaggctggagtgcagtggcgtgatctcggctcactgcaacctctgcctccctggttcaagcaattctcctgcctcagcctcccgagtagctgggattacaggcgcccgccaccatgcttggctaattttttgtatatttagtctggtctcaaattcctgacctggtgatctgctgcctcggcctccgaaagtgctgagattacaggcatgagctaccacgcctagcctgaagcatttgttttcttaaaaataactggggtagatcgggctcggtggctcatgcctgtaatcccagcactttgggaggctgaggcaggtggatcacctgaggtcaggagttcgagaccagcctgaccaacatggtctctactaaaaatacagcattagctgggtgtggtggtgcatgcctgtaatcccagctacttgggagactgagacaggagaattgcttgaacccaggaggcagaggttgcagtgagccgagattgcgccgttgcactccagcctgggcaacaagagtgaaattctgtctcaaataaataaataaataataaaaaatgactggggtaaaattgatttatttatgcttttctgaacatttttttccacatctctgtctctttacacataagatttatctgccaaaattttttttcttattttgaccattctcagtgagggtcattccaccccaggagatactgtaaccaagcaggtgcaattgaaggcaggccttggctgaccaggtgagctctaagcaattgtaaataactaccttccaaatatgtataatttatattttttatttatataccataaacgtttattaagctgtaatatttacaatattattttctgttctgagatctacaactatatctacataacaccaatgacaatattttaataaacaggaggaatatatatatatagctttacaaaaaaagcctgatacatttgcatcgtataagatactgtagaatcaatttccaaagctcaaagaactaaaacacacacacacagacacacacacacaaacatcctaatacaagagtcaacatttctcctctttcctgggtccaggtatgagagtcatcactgtgtctgtgagctgagaccagaaataagacacccacctgtggcaacatccacatataaaagtcacaatacaaactgtgagctatatccacaagtgagactcagaacctcagcagtgggctccgtccatgtgtgagggtgataatcctgtcagctgggtgtgcatagaagagtcacaatctcaactttgtactgggacctaatatgaaacccttggtgaaatgtaagggctttatattatatacatgagtgtggtaatcttctgagaactttctgcaagtagaagactcaggaccttacccattgccctaagcccagctacaagaatcaacacctcttctattggctaaatccaagtatgagagtcatcattgcacctgtgagcttgatccagaaatgagtcatcatctcacacattgctaaatttacataggacagtcacaactctaactgtggaccatgtccacatgtgagattcaggacctcaccagtggattctgtccatgtgtgagagtgacaattctaattgtccactgggcgtgcctatgggatgcacaatctcacctgtgtgctgagtcctgttaggacactctgtgtcactcaaggatgttataggatatgcatgagtgtcatcatcttctgtgacattaccacaaataggaaacagaagaccttacctattcccctaattctagccatgagagtcaaaatcttttctgttggttgggtccacatatgacagtcatcatcacacctgtgagctaggcctaggtatgtcacaatcccacctgtgggaagaccagacaggagagtcacattgcttgaatgttggtctaggaatatttcaataaccccatgtgttcagggccctggcaagaaagtcacattacttgagtgctgagctcagcaatatgtcaaaatgcctctgtgggcagggcttagcctagagaaccacatcacctgggttctgtgtaaagcaatatttcacaattaactctgtttacatggctcaggaaggaaaggaaagtcatgtaggttctggcctactggataggtcacaatccctcctttgacagaactcaggcagcagagtcacatcatttgtgtgtagggcccagtatatgtcaaaatcctcactgcagtcaggggccatgatggaagaaagagtcatgtcacctaggttctgggcaaggaatatgtcacaatccacctgtggactcagctctggccccagagtcacatctcctgagcactaaattcaggaatatgtcacagtgccctttgtggtacaggccagagcagatgtatcacatcacctaggtgctatgcccagcaatatgtcactatttattttgtgggcaaggcccaagcaaaagaagaattacatcatctaggtgatgagccccatgatatatcacagtgccccctttgtgtagggtccaagcagaagtgaaaagtctcatcattgtgtcttgggcctaggaatacatcacaatggcttgtgtaagcagtgcttaggcagaagagtcccattacctaggtgctgggcccagagatatgtggaaatcttcctgtgggcagagcacaagcaggtgaggaaggtcacatcagctaggtggtaggcccagagatatgtcacaatttcccctttagggcaggccaatgcagaagagtcacatcacctgggagatagtccccacattatgtcaccttgccccttgtagacagggccctggtgggagctgaaaatcgcatgacctaagggctagtcttagcgatatcttacaattctcttttaggacagagtacagacaggagaggagagtcacatcacctaagtactgagcccagtgacatgtcaccattctcttttatggcagggaccaggagcgtcacatcaccaaggtgttgggttcagtgatatgtcaaaatctcccctatggacaggggccaggcaggagaaaacactgatatggtttggctgtgtccccacccaaatctcaccttaaattttagcaatcccttcatgttaagagcaaggacaggtaaatataattgaattatggaggtggttttatactgttcttggggtagtgaataagtctcgtgggatctaatggttttataaaagggagttcccatgcacaggcctttatgcctgccaccatgtaagatgcctttttgctcttcctttatcttttaccatgactgtgggcctcctcagccatgtggaactgtgagtccattaaacctatttcttctataaattacccagtcttgaggatgactttattcgcagtatgagaacagactaatgtagaaagtcacaattttagttgatgggcccacacatatatcacaatgccctctgtgggcagggcccatgcagcagagtcaaaccacttgagtgctgggcccagcattttgtaacaatcacagctgtgggtggcacatattcagaagaggatagccacttcacccaggtgatggggccagagatatgtcacgatgccccttttgggcaaagcccaggtagtagaggagagtcacctcacctaggtctggggcccagtgatattttctatttttttgtatgtaaggcacaggaaaaagtcacatcacataggttctgggttcagtgatatgtcacaattcttcctatgggcaacacagaggcagaagagtcacctcacgtacatgctggatacagtaatatatcaattttccctgaaaacagggctctggcaggtaaaaagaatcccattacttgggtgatgagcagaaagatgtgtcacaatgccttttgtaggcgggcaaggccaggcaggagactaacatcacctgggtcctgggctcagcaacatgtcacaatctccccttgggcattgcccaggcatgaaaagagagttacatcatctaggtgatacatccaaatacatgtcacacacacaaaaaaacagggcctagaaaaaaatagagacagattacctaggtgctggatccagagacatgttacattcccttctgtgagccagaaccaggcaggagaggagagtcacatcacctagatgatgggtgcagaggtatgtcacagtgttctccataggcgaagcccagataggagagttaaatcatctgggttcaaggcttatgagtagggctcactcaggagaaaagagtcacatcatttagctgttgaacatggtaacatgtcacaatacccactgtgggtgggtcaataaagggaagaagcattacatcacctaggtgatgagcccagtgacatctcacatttcccactgttgggagggcccaaacaggagagagtcacattacctaggtgctgggcccagcgatatgcaactctcccccgctgagcagattccaggcaggagaggaaagtgacatcatctgcttgctgggctcagcaatatgttaccattcatcctgtggatggggtccaggtagtagaggtgaaaaaaatcacctaggttctggattcagtgatatgtcataatacccccgagggaatgacccagggatgagaggggagtcccttaatctagttaatgttcccagggatatgtcacaatgtccctgtaggaacagggaggaatgtcacaatgtcccatattccagggaggaatgtcctggaggaagaaatctaaatgctgggcttagcaatatgtcacaatcttttctgtttgcagatcccaggcaaaagaagaaagtcacagcatttaggtgtttggcccaggtatatgtcacaattccagttttggcctgggccaaggcaggaaagtcaaattactaaggagctgggcaaaggcatatgtcataatcacatttgtgggaaggtacagggatgagattgacaaccctgtatatgtcccagctctaggtatgagattcaacatctgtgtgttgggtcctcgtacatgagtcacaaactcaatggtggactgggcatgtgcatgagacctcaatctcaccagcagactatatcccagtagggaactcacagcctcacaggggtgctaaatccaggtcagagagtcattatctcacttgtggactggattcttgtctgagacacaattccaaattttgactgcctccagctatgagatttaggacttcaacagtgtgctgtattcaagtgggagggtgacaattcttacatcacctgggtgtacatacaagagtcacaatctcatcagtgtgctgggccctattatgacacactgtacaacttgagggctttaaaatatacacctgagagccacaatctgctctgagaccttcatgcttgtatggatctgtgatcttactcattgccctagaatcaggtatgagattgaacatctcttattggctggatccaggtatgagagttaccaccattcctgtgatctgagtccataaatgagtcaccattggaactgtggccatattcacatatgataatcacaattccaactgtggactgtgtttgcaattcaggcttagaattttaccaacaggctctgtccatgtgagagagtgacagttataactgtggcctgggtgtgcatatgagagtcacaatctctactgtatgctgagtcctgttatgatactctctgtaccactcaagtgctttatatagtatgagtgagtgatgtgatcctttgtgatctttatacaatttagaaactaaggaacttactggttgccctaatcttagctatgaaaattaccatctctcctattagctgagtccaggtacaagagtcatcctcatccctgttagctgggagcagggataaggctggatcatcacatcccgtgggtgctggaccagggctcggcaaatgtatacataaaaatcacacctgcaagaaggtccagtggttagatttacaattctgcacgtgtcccagctttaggtatgagagtcaacacctcctgtgagttacgcacaagtacaggactcatcatctcaatagtaaattggatccatgcatgagagtcccagccccacctaggggctgtgttctggtgtgagagtaacaggcccatgggtgtgctgaattctggtccaagcatcaccaccccacctgtggatgggatccatgtatgaaagtcatgattttaactgtcaactgtctctggatgtcagattcagaacctcaaaggtgagctgtgtccatgtgggagagtggcaactcttatttttgggtgagtgtgcatttaaggatcacaatcttccctgtgtgattggcaccgttatgacattttctgtatcacccaaaggctttatatgatatgcatgagagtcacagtctgctctgagagttttgtgctagtatgacccatgattttacctgttgccctaagcccaggtatgagagtcaacctctcactaatttgctgtatccaggaatgacagtcatcactgtgcctgtcagctggattcagaagtgagtcaccatcccacccgtggctggatccacgtataagtcacaattttaactgcaaactgcatttacatgtgagatttgagatcttaacatgtgtaagttaaaatcctaactgtcggctgggtgtgcatgtgagaatcacagtctcacctatgtgctgagccctgttatgacactctttgcaccaactgaaagccttatacaatatgcatgagtattgtaattttctctgaccgtcgtacaagaaacacacccaaaccttactcactgcttgaagcctagcaaagagaatcaatatctctcctatttgctgggttcaggtatgattgtcatcattgcaccagtgagctgagcccagatgtatgtcacaatcccgcccgtagacagggaccaggcagaagagtcacatcacctggatgctaggacaggaatatgtcaatcctcattatgagcaggatgagggaagaagagtcattgctgggttctgggcctagtgatatgccacagcccttcatgtgggcaggtcccaagcagacgagaacaataacattacttaggtgatgagcccagcaatatgtaacaatgcccaatatgagcagggcccagggaagagaggagagtcacatcacctagttgctggttcccataatatgttgcaattcccactgttcacaggacttagcaaaagaagtgagtcacaaaatttaggtgctgggctgggtgtggtggctcatgcctgtaatcccagcactttgggaggccaaggcaggcaggtcacctgaggtcgggagctcgagaccagcctgaccaacatggagaaaccctgtctctactaaaaaaaaaaatccaaacatagccaggcgtggtggcacatggctgtaatttcagctactcaggaggctgaggcaggagaatcccttgaacctgggaggcggaggttggagtgagccgagattgcgccattgcatgctagcctgggcaacaagagtgaaactctgtctcaaaaaaaaaaaaaaaaattaggtgctgggttaagcaatagttcaaatagttcacaatccccactgttggcaaagatcaggcagcagagaagactcaaatcacctagatgcttggtgcagcaatatgttacatgttcttctgaagctgagacccagacaggagagaagagtatcttcacctaggtgtttgactaagaaatatgtcataatgtcccatgtggggagaaataagtcagaacaagcacatcacctaggtgctgggcccagtggtatgtcacaatcttctctgtgatcaaagccttggcacaaggggagagtcacattacctaggtgttgaattcagaaatatgtaacaatcacttctaagtaatgggttcaggcagatgaggagagtcatgttaccttggtccttggccttgatatatgtcacaatttcatttgtgggctgagcccacaaagaaaactaaaatcactcagggtatgggcaaaagcatacatcacaatcacacctgcagaaaagtccagggatgagatacacaatcccaaacatgtccagctccagggaggacagtcaacacctcctgtgtgttcagtccgagtatgcaagtcagaatctagatattggactggatttgtgcctgagagtctcaaatcaaccttcagattgtgtcctggtagtagagtcacagcctcagaggtgtgataaatcttggtctggagtcattatctcatctgtggacctgatctatgtatgagactcacaattccaacttttagctacctcttgagtgtgagattcatgacctcaacagtgggctgtagctatttaagagggtgaaaattcttactgtgaactggacgtgcatatgagggtcactatctcacctgtgcactgggccctgttaccacactcttggtgccactcgagggctgtctatggtatgcctcaaagtcacaatccacaattagatctacatgctggtatgaactcatgatcttacccattgtcctaagcccaggaatgagagctaacatctctcttattggctagggtcagatgtgagagttctcactgtgcctgtgagttgggtgcagaaagaagtcatcatcccacctgtggccagatccatgtatgacaatcaaaatttcttttttttttcttttttttttttgagatggagtctcgccctgttgcccaggctggagcacagtggcatgatctcagctcaccacaacctccccctgctgggttcaagtgattctcctgcctcagcctcccgagtagctgggactacaggtgcgtgccaccatgcccagccaatttttgtatttttagtagagatggggtttcactgtgttggccaggctggtctcgaactcctgaccttgtgatccacccgcctcagcctcccaaagtgctgggccactgtgcccggatgacagttacaatttcaactgtggacggcatccacatgtgatactcaggacctcaccgtggtctctgtccatgtgtgggagtgacaatcctcactgtttgctgggtatgcctatgagaatcacagttttaactttatgctggaatctgttatgacactctctgtatcatcagaagggatcatacaatatgcatgagttttgtaatcttctgtgaccttcatacaagtagaaagtccaggaccttgcccattgcttgaaggctacctatgagcgtcaacatatctcctcttggctagatccaggtatgcagctaatcactgtgcctctgagctgggtccagaaatcagtcactgttcaacttgtttccaggtgtacacatgacagtcagacttttcactgtggactgcatctgcgtgtgaggttcagaagctcaccagtgtgcttctttcatgtttggaagtgacaatcccaattgttggcttggtatgcctgtgagagtcacagtctcacctgtgtgctgagtcctattattacattctctgtagcacatgaagtatttataagatatgcataaattttatacatctctgtgacccttctaaagtaggaaacccaggactttacctattgcctaaagtctaactaagagcgtcaaaatcattcctattgtctgggttctcatatgagtgtaatcgtaatgcctgtgagctggaaaaactatatgtcaaaacttagcctgtgtgaataaaccagaaaagagaatcatgtcacctgaacactggactaaaaacatgtcgctatccactctgtggggagggccatggcagagaagtcccataacctgggtactggtcccagcagtatgttgcaatgccttctgtgggcaaggttcatgcaggaaagacacattatctgcatgcagggcacagcaatatgtcaccctgtgtacagggctcaggtaagagaggagagtcacaatatccagttgttgggcctattgataggtcacaatgcctccttttggaggagccaaggcaggagagtcatatcatttatgcatagggctcagtgatatatcacaacccacactgcggcaaagcccatgcaaaagagtaaagtcatatcacttaggtgattggcccagttatatgctacaactatctgtgttggcagggcccaagcaggagaggacaattacataacctgggttatgggcccaaagatatgtcacaatttcccctgaggacaaggcctatgtaggaaaggaaaataacttaaatgcttggctcaggtatacatcacaattttatttttgggctttacccaggcaggagagtcaaatcactcaggtgctgggcaaatgtatatatcacaatcacactagcaagaaggtcgagaaatgagattcaaaattccacacattttctgacttcaggtatgagagccaagagacctcatttgagttgggtccaagtacataagtcacaatcttaatggtggactcaatccctgcaagagagccccaattccaaatgcaactatttctgaatctaagagtcacagcctcacaggtgttctgaatcctagtctttgagtcaccattctacctgttaagcagatccaagtatgagagtcataattccaactttcaactgcctccatgtgtgagatccacagcctcaacagtggacggtttccatgtgtgacagtgccaatgtttactgttggctgagtgtgcataggagagtcacaatttcacctgtgttcttggttgtgttatgatactatctgtattacccatgggctttttatggtataagtggcagttgaaatctgctttgagaccttcatgctggtatgaaccaatgattgtacccattgccctatgcccaggtatgagagtcacatctctcttgttggccagatataggtatgacagtcatcaaagtgtctgtaagctggctccaaaaataggtcagcataccaactgtcccaggacccacatatgactgtcacacatctaattttggagtttgcccatgagattcaggacctcaccagtgggctcttcttatgtgtgagggtgacaatcctaactgtcagctgggcatgcctatgagagtaacaatctcacttgtgtagtggatcctgttattatactctcaatattacacagaagctttataggataagcttgagtgtcataatcttttgtgatctttcctcacataagagacacattactttatccattgcgctaagcctaaaataaaaaggcaaaaaacacccttattggcgggtccgtatatcaaattagccagtaaaaaagatactctctgtcctagccaggctgagagaaacaggtcttctgggtcttctctttgtacaaagatcataaaaaattaccacttccttccaaattgtataaagaccttgggtgatgcggagagtgtaaaatgcaggtgatacagagagtgtatccagcacacaatagaaatttttcttattttatgtacacccagccaaccattagccttgtcaccctcacacataaacagagcccactggtaaggtcctgaatctaactcgtggatgcagttcacagttgaaattgggactgcatatgtgaacacctggctacagttggaatagtgactcatttctaaacccagctcataggcagatgaagaccctcgtatctaaactcagccattcttaaagatgttcactctcatatctgggcttagaatcacaggtaaaattgtaggttcacacaagcacaaaagtttcagaatggattgcaactctcatgcatactgcataatgccctcagtaagacagagagggtccttacagggccgggcacacaaatgagattgtgacactcatatgcacacccagccaacggtaaaaactgtcatccaaccacatgaatgcagccagtgttaaagtcctgaatctcagccgggtgcggtggctcactcctgtaatcccagcactttgggaggccgaggtgggcggatcatgaggtcaggagattgaaaccatcctggctaacacggcgaaaccccgtctctactaaaaatacaaaaaattagccgggtgtggtggcgggctcctgtagtcccagctactcgggaggctgaggcaggagaatggcatgaacctgggaggcggagcttgcagtgagccaagatcatgccactgcactccagcctgggcaacggactgaggctccgtctccaaaaaaaaaaaaaaaaaaaagtcctgaatctcatgccaggaggcagtcgaaagttggaaaactgattctcatatgtggagagtcagcaacccacctgaccaagattcatcatacctgtgaggctgtgaccctttgaaaataatacagtgcatgggagggattgtggctgtcatgcaaggatcctgtccgctgttgagattgtaactcttgtactgagacccaacatacagaatgtattgactcttatacctagaactgggccatgtgcatgattgttaattttatccctggacttttctgcaggtgtgatcgtgacatatttctttgcccagtacctgagtgatttgactctcttgcctgggccctctccttatagggtgttgtgacatatttccgaacccaggactaagtgatttgactttcttctgccacttgggctctgaccaagaagggattgtgatgtattactggacccagaaccaaggtgatgtgactcttctcttacatcagggcactgccaaaaaaaaattgtgacatatcacaggaccctgattctagatgatgtaactctcctctttttgctttgccccacatattttggataccatgacacatcgctaggcccagaacctaggggatgtgaggctcctgcctaagcccaccctgcagcgagccttgtgacatatgtctgcatccatgacctaagaattgtgactctttctgcctgaactttgccaacaaggaaaattgtgacatatttctgcacctaccaaccagctgatgtgtctctcctgcctgggattttcccagagagagcattgtgacatattgctgggtccagcagccaggtgaggtggttctgttcctgttgcattgttttcaggagaagatttttaaatattcttggctaagcatgctaatgatgtgactctccagcctggtccctgttttcagaaaagactgtgacgtatccatggcctagtgcctaggtgatgtggctctcctgttcgctccctaccaagaggtggcattgtgacatatatcttggttcagctcacagatgcaataatgactatcataccttgtgagttgaaccaggcaatagaagagatactgactctcacatttaggcttagaaaaatgagtaagaccctgtgtctcctctttgtatgaaggttatagaaagttaccactcacatatcacataaagcatttgggtactacaatgtcatcacaaatcccagaacatgagtgagactgtgttctcgtgtgcacagtccaccaaccattagaatttccaccctctcacattgacagagactacaggtgatgttttgaatcacacacaaatgcagtcagtccacagtttaaactgtgacttttatatctgaacatcaaggcacaattggaatggttattcatttttaaacccagcttataggcaggtgaagactctcctatccggacacagtcaataagaaagatgttgactctcacgcctgggcttagggccataggtacgatcaaaggtctcttctaacatgaagatttcagagcaaattttgactctcatgcatattgtataaagccctcgagtggtacagagagtgttctaacagggtccagcacgcaagtgcaattgtaactctcatctgcacacccaggcaagagtaaagattgtcattgccccacatgaacacagctcactgttgaggttctgaatctcacagcctgaggtggctaaaagttgcaaacttgactctcatacatgaatctgttccacaagtgggttcatgacactcagattaagattcagcaaacccgtgaggctgtgactgtacttaaaaaacacaatccccagaaggaatagggctgtcaaacatagatcctgttggccaatgggattgtgacttgtgtacttagaatgaccatacagagattgactcatacctataactgggacatgtgtgagattgttaatctcaaccctggaccttcctgtaggtgttattgttacatatgccgcagtccagcacctgagtgatttgactctactgcctggacccagctcacatatgagattgtaacatataactgggcgctgggacattttgacaccactgggccttgcactcgggtgatgtcttctctcatgccttgacgctgcccacgggaggcattgtaatataccattgggtcctatgcccatttgatttaactctcctgcctaagtcctgcctatacagaaaattgtttcatatcctgggcctgtcaccaagtgatgtgactatcttcatttgcctgatcctagctctcaggggagaatggaacatatcactttgttcagtactgagctgatgtgacttctcttgccttctgaggttttcctcacaggggagattgtgacataaagctgggcccaacaccatggtgatgttactcttttgccttggcactgtcttcagaaggccttgtgacatattgctgttaccagcaccaaggtgaagtgtgtcttgtgtttggaccctgcccatagagtgcattgtgacatatctttgggcccatcaactatttgatttgactatccccccttaccacatctttgcccataagggatatggtgacatatatctgggcccagcaccttggaaatgcgatgctcctctcttgcctgaggtatgttcagaaaagaaagggtgatgtattgttgtttatcacctaggtgatatgacctagtacattactgagtgcaaatgtggtgtgatacttctgcctggtccttgccaataaaggtaactggaatatatctctgagagcataacttagatgatgtgagtctccttttgtttcttgagtctgtccacagtggaaattatgatatattgccaggccttgcacccagtttttgtgactctcctgcttgtgtcctttccatgtggggcattgtgacatatttctgaatccaacaccaaggtgatgttactctcttgcctggaatattgttacatctctctgcactcatcactcaggtgatttgacttcttcctcctgcctggtccctgctctcagagggcattgtgacatatcacttggctcagcacctacatcatgtgactctccactcatgcctcaaccatggcttactagggtgattgtgaaatataacttggtctatctcataggctttgtgactttcttcttcctgagccctaacacagaaagcattgggatatacctctgggcctcttgcctaggtgaggagacttttctgcctaggccctcttcttagggggtattgtgacatattgctggacccagcaactagatgatgatgatgtgattctcttctactgcttggactttgcccaagaaggaattgtgttgtatcatggagctaagaacctaggtgttgtgactctcctcttctgccggggccctgcatacattctatgttgtgacatatggctgggatcaaaacctaggtgatgcaactcttcaacctgggccctgccagcggggtattatgacatctttttgttcatcacctaggtgttgtgactctctccttctgcctgggttccgacaaaaaaggggattggggcatgtcccttgaccgagcacctaggtgatgtgactgtcttatttgcctgggccttgcatatttggggtattgagacatatggctgggccctacatcaatgggatttaaggctcctgccttggtcctgctaacagaaaactttttacatatccctgaatccatcacctaggatatgtgattctcttcttctgccggcattctgcccacaggaaacactgggacatattgctgggcccaccattgagatgatgtggcattcctgcctgggtactgcccacagggagcattgtgacacatcactgggcccaccagtgagatgatgtggcattcctgcctgggtactgcccacagggagcattgtgacacatcactgggcccagcacctaggtgatgtgagtatgcatcatgttccctgctttcaggaaggcattgtaaaatatccctgactgagcatccagggatgtggctcttctagctggtctttgtcctcagggaagagtatgatatatgccttgcccagctcccaggtgatatgactctcctgctcactctctacctataggtgggattatgacatatcttggcccagcttacaggtagtatgctgaccctctttcctcgaaccagtcaatataagagatactttcatagctagacttagtgaaatgggtaagatcctgggtctcctctttgtattaaagtcatagagaattaccactttcttgtatcttatataaagtcctccagtggtagagaggatgtcatcacagggcccaggacacaagtgagattgtgtttctcatacacacatccagccaactgttaggattgtcaccctcacatctaaacagagcctactggtgaaatgctgaatctcacatgcagacgaagtctgcagttaaaattctgactgtcatatgtgaacacctggccacagttgcgatggtgactcatttctaaacccagctcatagagaggtcaggattctcccatctagactcagccaataggagagatgttgagtctcatacgtggaattaggggcacaggtacaatcatcggtgcataacagcatgaaggtctcagagcagatgttgactctcatacataacatatgcagcccctgaatggtagagagactgtcctcacagagcccagcaaacaggtgaagttgtgacactcctttgcataggtggccaatagtaaagattgtcatccttccacgtgaacacagcccaccgttaaggttctgaatctcccacctggaggcagtggaaagttggagaattaactctcatacattgatcttgtccctaggttggttggtgaatctcagatcaagattccccacatctgtgaggctgtgactgcactaaggggaaacagtcttcagaaggagttaagtctcttttgtacagattcagtttatttttgagattgtgactcatgtacttaaaccaaacctacaactggggcatgtgtgggactgttaatcctatccctggaccttcctgtaggcgtgattctgatgtatgcccctccctgggtctaccttccaatagagattatgacatgtcattttgccccatacttagctgatgtgatctattctcctgtcttggctgtctccatagaagatattatgatgtatctacaggccctgcacccagtttacgtgatttctgcctgtggcctgcccacattggctattttgacatattgcacagtccaacacccaggtgattttactcttctgcctgggcccttcctacgggggacattaggacatatttctgtgcccattgtgtgtgtgtgtgtgtgtgtgtgtgtgtgtgtgtgtgtgtgtgtgtgtctgtgtgtgttttgagacagaatctcactctgtcactgaggctggagtgcagtggcatgatcttggctcactgcaacctccacctcacaggttcaagtgattcttgtgcctcagcctcccaagtagctgggattacaggcgcctgccatcactcctggctaagttttgtatttttagtagagatggggtttcactatgttgaccaggctggtctcaaactcctgacctctggtgatccacctgcctcggcctcccaaagttctgggattaaacgcatgagcgaccgcacccggccacatccatgtgttttgactctcttctcccgcatgatttctgttgaggggggggattgagacatatctctggtctcagcacccaactgatgtgactcatctctttttcctatgttttgctcacacaaaagatagtgacatatcgctaggccaaacaaagtggcattactctcttgatttggtcctcctctcaaaaggcatcatgacatattgatgggcccagcacgaaagtgatttaagtctcatgcctagactctgcttacaggggcattgtgacatatctctgggccaatctactatttgatgtgactctccttttgtacctgggctttgcctatagaagacattgtgacatatctctcggctctgcacccaggtgacttgacttgcctcttctgcttgggccatacctacagggaacattgatacatatctgtggccccaacatgtagatgatgtgactattttcttttttcttggacccgtccacagtgggaattgtgacatatcacttggcttagcatttgtgtagtgtgactctcctctcatacctaggccttgtccactggggtgatatatatctgggcgtagcccctaggttatttgaagctcctcttttccatgatccctacttatagcatgcattgtgaaatctctggtctactcacctcggttatatgactttcttttatttttatttttatttatttatttttgagatggagtttggctcttcttgtccaggctcaagtgcaattgtacgatcttggctaactgcaacctctgcctcccagtttcaagcgattctcctgcctcagcctcctgagtagctcggattacaggcacacgctactatgcccagctaatttttgtattttcaatatagatggggtttcaccatgttgaccaggctggtattgaactcccaacctcaggtgatctgcctacctcaacctcccaaagtgctgggatttcaggtgtgagccactgtgcctggccataactttcttttatttgcccttccatcaggggacattttgacatattgctgggcctattatctggatgatgtgactctcctcacctgcctgcaaactaccagaaagggacattgtgacatatctctaaaccaattttctacataatgtgcctcttctctgctgcccaaaacatgcataaagaaaatattctttaggcccctgtgacctatctctggacccggcacccaaatgtcatgactatccagtctgggctctgcctagaggaaatgttatgatatgtcactgggccatgaacacaagtgatgtgactctcctgcctgggccttgcccatagaggggattgagacattccaggtgaagaatcaaggtggtgttactcttatttctcagccttttcctaaggtaaaattgtgacatataacttggcccagcacacagatgagatttttactcttgtatgcaaacccagccaaaagttactattgtcactataacacatgaacaaagaccactgttgaggtcctgagtcttatatgtgaacacagccaacagttggaattgggactgtcatatgtttatcttgccagaagtgagatggtgacttactctggattcagttcacaggaatggtgatgactctcatacctgaacccagctaataagagagatgttgactctggtagctaggctttggggtctgggtcctttacttggaggaaggcaacagaagattatgacatccatgtatgttgtataaagctcttgggaaatactgagtgtcattacagggcccagtacacaggtgtgattgtgagtctcctatacatacctagccaacagtttgaattgccatgcttatacatagaccgagcctactggtgaggtcctaaatcttacacatgaacctattccaccattgaaattgtggctgtcatatgtggatccagccataggttggatgttgacaaatttctgaacccaactcacttgcacaataaacccagccaatagaagatattttgactcttgtacctaggcttagggcaacaggtaaggttttgggttttctacttgtataaatgtcacagaggattactgcactcacttatattgtataatgcccccaaggttgtaaagaaagtgtcactacataactcagcacaaagttgagattgtgaatctcaaatgcacactcagccaacagtaagaattgtcattcacacacatggacagaacccactggtgaggtcctgaattttagtcacagatgcaatccacagttgaaatttttaatgtcatgtgtgcatctagccacaggagggatggtgacacatatctgaacccaactaagaggcagagcaatgacttttatacctggaaccagccaatacgagagatgttgactctcacacctgggcatggggcaacaggtaaactcatgcgtttatacagcactaatgtctcacaggggattatgagtctcacccaaataatgtacagccctctggtggtacagagagtgtcataagaggacccagaacacagctgagtttgtgattctcatatacacttccatcccacagtaaaaattgtcatcctcccacatgaatacagacaactgttgagagtcacatcacctaggtgctggtcctagagatatgccacagtctattctgtgggcacagttcaggtaagagaagagaagaggaaagtcacattaactaggtgattggctcagagctatgtcacaatgctcctacaaggcagggtccaggcaggagactcaaatcaccttggtgctgagtccaacaatatgtcacaatctcccctgtaggcagaacctgagaaaaagagttacaagaattacatgtgggcctattgataggtcataatctttcctgtgagcagaaaccaggcagtagaaaaggttcatatcacctgcgtgattggcacatagatatgtgaaaatgctccctacaggtagaccccaggcaggaggcttacataacgtgaatgtcagccccaaaaatatgtcacaatgaacccacacgggctgggcacaggcagaagagacatataacctgagtgctaagtgcggggcctagaaacatgtgacaatgctccatgtaggcagggccaaggcagaatagaataacatcacctatgttctgggtccagtgatatatcacaatttcatctctgggctgagactcaaatcatgctgggtgctgggcacatgacatgtcagtcacacctgcaggtaggtccagggacgagattaacaatcctgcacatgtcccagttttaggtatgagagtcaacactgttgcgggaagtcagggaccccaaacggagggaccggctgaagtcatgacagtagaacgtggattgcaaatatttcatggacacttatcacttccccaatcaatacccttgtgatttcctatgcctgtctttactttaatctcttaatcctgtcagccaagaaggatgtatatcgtctcaggaccctgtaataattgcgttaactatacaaattgtacagcgtgtgtgtttgaggaatatgaaatgtgggcaccctgaaaaaagaacaggataacagcaatagttcagggaataagagagataaccttaaactctgaccgccagtgagccgggcagaacagagccatatgtctcttctttcaaaagcaaatgggagaaatatcgctgaattctttttctcagcatgggatatccctgagagagaatgcacacctaggggtaggtctctgaactggcccccccggggcgtacctgtctcttatggttgagactgcaggggtgaaataaattccagcctcccatagtgctcccaggcttattaggaagaggaaattcccacctaataaattttggtcagactggttgatctcaaaaccctgtctcctgataagatgttatcaatgacaatggtgcccgaaacttcattagcaattttaatttcgcctcggtcctgtggccctctgatctcaccctgcctccacttgccttgtgatattctattaccctgttaagtacttgatgtctgtcacccacacctatttcgcacactccctccccttttgaaaatccctaataaaaacttgctggtttttgtggcttgtggggcatcagggatcctaccaatgtgtgatgtctcccccagatgcccagctttaaaatttctctcttttgtactctgtccctttatttcttaagccagccaacgcttaggaaaatagaaaagaacctacatgattttgggggcaggtcccccgaaacaacacatcctgaatgttgggtccatctacatgaggcacatctcatcagtgaaccggatctatgcatcatagcctcaattcctattgcagattgtgttgacttaatggagtcccagcctccttggtgtgctgaatcctggtctgagagtcaccaagccacctgtggaccacaattatgcacaagagcctttttttttttttaatcttctgactgcctctgggtgtgagatttagaacttcaacagtgcactgtgttgatgtatggcttacatctttacttgaccatccttactttcagctgggttttcatatgagggtcacaatcccacctatcttctgggccctgtgaaaacattctctgtaccaactgatggcattatacattgtgcattagtgtcaccattcactccgagacattcatgctggtatggaccaatgattgtacctgtggccctaagccaagatatgacagtcaacatcactctagttggctcggtccagataggagagtcccgcctatgagtggatttagaaatgagttaccattccaagtgtggccaaatcttcacgtatgaaagtcgtaattccaagtgtaagctgcattcctgtgtgagatttaaaacttcatcagtgggctttgtcatgtatgaatgtgattaatgaaatggttggcagggtgtgtgtatgtaacacacaatttcacatgtgtgccgggctttgtgttgacactctctgtaccacccaaggtctttatatgatatgcaacaaagtggtaacccattacctttgaacaaagggaaggcccacaatattacccatattggctggttcgaggtataaaagtcatcatcacacctgtaaactaagcaaagataaatgtcacaaccctacttgtgggtagggagcaagcagaagaatcacatcatctgggtccttctccagggatatgtcacaatcatttttgagggcagggaattggcaggaaagtcacattatctgtgtgctgggctcagtgataagtcactctctattttgtgcagatggtccaggacaaagctcataggagagaagagttcccatcaaagagttgatgggtccaaagatatgtcaaattaccccttgtgggcaggatgcaggcaggagacttacatcaccttggcgctgggcccagaaatatgtcacaatgtcttgtgattgcagtgtgaaggcaagagtaacgtcaacatagtgctgggacaagggacatgttacaatctccccggtgggcagaagctagggaaaagagaaaagccacatcagctaggtgctagtctcagagataagtcacaatttttcctgtagactgagaccaggctggataagagagtcacatcacctgaataaaaggcacagagataggtcaaatgccccttgtaggaaggtcccaagcaggagagttacatcatgtgggtgatgggactcagcaatacacctcaatggcccatatgggcagggaacaggcaggagagccaaatatcctgggtgcagggcccagtgatatgtcacaatgccctctggggcatcgccaagacaagagaggagattcacagcacctggctacaaggcccagaaatatgtcacaatgtcccctgtggttagagacaaagcaaaatagttacatcaattagatactgagtccaatgatatctcacaatttacctttgagcccaggcagaaaactcaaatcactcatgtggtgggcaggggcatatgtcacactctcacctgctggaaggtctagtgatgagattaagaatttagttgccgggcacagtggctcatgcctgtaatcccagcacttttggaggccgaggcaggcagatcacctgaggtcaggagttcgagaccagcctgaccaacatgacaaaaccctgtctccactaaaaatacaaaaaattagctggtcgttgtggcagatacctataatcccagctactcaggaggctgaggcaggaggatcgcttgaacctgggaggcagaggctgcagtgagcagagatcattacactgcactccagcctgagcaagagtgagattctgtctcaaaaacaaaaaaaagaaggaaggaaggaaggaaggaaagaaaaaaagaaaaagaaagaaagaaaaagaaaaagaaagaaagaaagagagaaagaatgaaaagtatttagcatgtgtcttggttctaggtacaacacctcttgtatgttgagtctaaatacaggagtcacaatctcagtggtggactggaatcaattatttttgtggactgtgtgagcctcaatcacttttgtggactgtgtctccttagtcacagccttacaggtgtgccgagtcatggtccaaaatttgccagccctccttttgactggatccacatgtgaaagtccacactttgactgcctccagttgtgagatttagttcctcaactgtgggctgtgttcatgcggaaaggtgacatcttgactgttgggtgtgtgtgcatatgagtgtcatattctcatctgcgttctcggttttgttaggacactctgtatcacctgagggctttatacattatgtatgagagtcacaatctgctctgacatatttgtactgatatggacccatgattgtacccgtggccctaagcccaggtatgagagtcaacatctcttcaattaggagagtccagattggaaagtttttacctgcttataggctgggtttattaaagagtcactaacccaacaatggccagatgttcacatatgacagtcacaattttaactttggactgtgtctacttgtgagtttcaggacctcaaaattggaccctgtccatgtgtgagggtgacaactttaaaggttggcaggttgcgcatacaaaaaacaatctcatatttgtgctgtgtcctgcgatgacagtttgtaccacttgatggctttataccgtatgtgagggagtggtaattctctatgacatttatacaaagaaaagacccattattttacccatttccctaagcctagctattagagacagtatatcttttattaacttttttgggggggtacaaatgtcatcatcatatcagtaatctccacaaatatatatatcaacatccctcccatgtgtagggaatgaggagagttatgtcaccttggcactggcccaggaatatgtcacactcttttcggagggcaaagaccaggcaggagagtcacatcaccttgatgcttagcgaggaatatgttacaatcccctcctgaaagtagggcacaggtggcagggtaacatcacctgggtgcagggcctagtgttatatcccaatactttttgtgggcaaggcccaggcaggagaggcatgtcacctgttttttgggcccagtaataggttacagtcttccaagtagaaagaagaagagtcactactttttgctgatgaatgcaaagatatgtcacaatttccttgtaggtagggtccagacataagcctctaatctaattccactaatccacactaattccaactctggctctgccagcttcttatgacttattgtatacttttcatttctgttatgctccaggaatgagtttctcagtgacttttgaagtaatttgtccacagctttggataaacattgccctcttgaatccaagggctgttttgttgagcatatgaaggcttcccttgagtattcctctcgcttccgttcactttcttctgtagcctccatttttctaattgctttcctatagcccctttttggcagttagctgaaaaacggccttcacagctactaaaagaatatgggaagtggaaatctgagaagagaaatacttattttgttgctagaatgctcttaccgagagtcactagaggtcaatggagtcgacgacataggccggaccaaggccacaggtgcaagagacacataaagcagagatcaaaatttgggtgtacatggtaagacttgcccattccagaaccccaaggatgaagagggggccacagttcaatcccatatctcctctgttctcaagtgggtaactagtgaatcacctacaaatagtgatcagcagcttcccaacaatatctcaagagttgggcgagtggggggaagtaatgcaagacccctgaagtatgacaacatacaaaaccccaagttaaacaccgtgcacttgccttttaagtcacccacttggccctcttctaagtgtactttccttccttttgtttctgttctgtagctttctaataaacttttactgctactctaaatcttgcctgctttatgtctcctgctttatgcccctcagttgagttgtttcttctgaggaggcaagaatcgaggttcctgatgactcatacccacatgaattcacttccagtaacaggtaacaggtaggagaaaagagtaacatcacctaggtgctggtccaggaatatgtcacaataccgtattaggggaggatccaggaaaagagtcatattacctaggtgaagtgcttagagatgtgtcacaatgacccctatgggtaggactcaggaagaagagaagagttaaattacctagaagctgtgcccagctatatgtcacaatcagcccagtgggaaaagccaaggcatgaggcacatcatgtaggtgctgggtcaagtgatatgtcacaacctcctctgtggacaggtcccaggaagaaaaggagacacacatcatctagcagaaaagcccaaagtatgtaatgatgattcctatgggcaaggatcaaggcagtagaatcacatcatctgtgtgctgggcccagtcataagtcactctcttctgtaggcatagcccaggcaggagagcagagttacatcaactaagtgctggacccagagatatgtcacattctctcctatgggcaaagagcaggtataatatggtaaccacttcaaatacttgagcttccagagaccatgtcacaatggtctctatggttagggttcaagcaggagactcacgtcacgttgattgtggccccaacaatatgtcacaatgttttctgagaagagggtcaaggtaaaaaagcaatgtcactttggtattgggcccagcaatatgtcactgtctcccatgtgagcagatatcaggcaagagaagagaatcacatcaccttagttatgagcacagacatgtcacaaagccccaagtaggtagtgccaaggcaggagaatagtgtcacatcacctaggtgctgggtccagtgatatgccacaatcccatctgtcagctaggccccccacaagagtcaaatcactcaggtgctaggagaggtgtatgtcacaataacatctacaggaagatccaggggtgagattaacaattccgtacttgtcccagttttaggtataagagtcaacacctcctgaatgttgagtctaagtacatgagtcacaatctcaagagtggactgcatgaaagcctctattcctcctgtaaactttgtattcttagtaaagtcgccatttcatgggtgtgctgaaccatagtgtgggagtcaccaacctacctgtggaccagatctatgtttgcaagtcaattttccaacttttgactgccttcgggtgtaggattcagaaactccacagtgggctgtgtgatgtcaccagctaaagggctattcatgcacagaagggttgttattgtaatcatcatggtttctgttgcttttaccttgttaagaatacatgcgtggctcataattgtgctagaaaaccctaagggttttggttaaattacctgttgttgtatgttataaagtagacataaaattggccaaaatagattaaaattctacaaatgtggagtcaagtttctcttgactccaagagaaacttggaggcttaggaaagacagacctggaaaaaacccaataaaaggctaatcagaagctcagaaaaactgcaaccagctgtcctttatctacctatgacctggaagctcccaccccacttcgtgttgtcccacctttctggacaatgtacatcttacatatagtgatggatgtctcctgtctccctaaaatgtataaaactaacacatgccccaaccaccttgggcacgcattgtcacagcctcctgacactgtgtcaccggtgtgttcttaaccttggcaaaatgaactttctaaattgagacctgtctcgatactttgggttcaaattagtaatttcaggtagaaattaaaattcttcttacaatagaaacaaacaaaaggactaaacagagaaaaactaataaaagtgtgctcaaggccgggcatgtgctcacacctgtaatcccagcactttgagaggctgaggtggatcactcgaggtcaggagttcaagaccagcatcgccaacatggtaaaaccccatctctactaaaaatgcaaaaattagcaaagcacagtggtgcgtgcctgtaatcccagctactcaggagggtgaggcaggagaaccatttgcacccgagggcaggggttgaaatgagccgagattgcacaactgcacttcagcctgggtgacaagagtgaaactccatctaaaaaaaaaaaatctaaaatttatatggtatgacaaaaaactctgaagagcagaaggattcaagcaaaaaagaaaggctaaaagtatcatcctacttgactttgaaatatacagcaaagctatagtaatgaaaacagtatgatacttgaacaaaaatagtcacattggccaatggagaataaaagagaaaccagaaatacatccatgtatttaaggctaaccaattttttatatagatgacaatttcttaggaaaatgacagtatctttaaatgtaaagcctgaagctctgaaactactaaaaaatatatagattgaaagccctataacattggtttgggcagtgattttttttatttaacctcaaaatcccagggaactaaagatcatacatgtgacaaggggtgaatatcaagattatgtaagaaagtaaaaaacaaataactactaaaaatgagcaaaaggcttaaatatttttcaaaaaaagacatacatatggccaacagatatttaaaaatgctcaatgtcacttattatcagagaaaggcaagccaaaaaatctatgagatataaagtcactcatattagaatgattcttattaaaaagaaaaaaaagcattggtaaagatgtgaagaaaagggaatgcttgcacactgcaggtttgagtgtaaatgaggaaaaccattatgaaaactgaaatagagatttcttaataaatttaaaatcaaactaccatataatacagcaatttcactattggatatatatatttaaaaacaaatgaaataagaatgagaaacatttgcacttctatgttgtttgcaacactcttcacaatagccaaaatatagaatcaacagttcaacatccaatgagtaaatattgacaatgtagtatatatacacaatggaatactatttctcttttagaaagaaaactctattatgttcaatcacatggattaacctggaggacattatattagtttaaataagccaggaacagaaacattaaaattttatgatttcacctacacaggaatgatataaaacttaaattaagtagagagcaaaattgtaaccatcagacgccaaggtatttagaagaaagagggctttagaaagatgtttgtcaaagaatacataattataatagcatacaagtaacacattcaaaagactgattgtacagcatggtatctacagttaatagtaatgtatttttgaaaaatgctaggataatgtcatgtgctcttaccacaaaaatgttaactgtgtgaagtaaagcattaattacctaaaattaagcatttgacaatgtatatatatacttcaaaacatgttttacagaacatgttttatctatcaagttgaaaaatatatatttgaaacattatagaaggataccaattttttcaaatactctctgtctttgtcattaacttggctaaatagtatccaaaatatatttttgtgctgtttttgtcatttaatttttcagtcataaccataggagctctgacatttaacagcatgttctgaatgcagtactgtgcataggaggagccaatgtacattagggtttttattttaagcttgggacagcaggagtttctggggctaattgcaatggtatgaaagacattaaaagggcaggtgttgtttgttctcaagactggccactgtttgaacacagtaaacaagtttgcatgcaaaataataggaaatgttttaatctgaaagccatcgtaacctcatctccaaaattttttcagagaaaatgaccaaagagttgcctacagtgaggtgactaaaaataaaaactgtagactgaacttcaccaacttcaaaaattatacaacagtaaaaattttctccaaattgtaatatcagtatgaaaaataaacacttcaaatgtctaatcaacagagtacattttattatttttcaacatttaacatttacacttaaaaataggagtctgtataaaaatgtaacgtgctgtatcatagaaaattaaatttagaatccttacttaccactaactctcttttaaatataacttataagatatattttgtaacaaattttatgcttgccacactttgtgtaagaatccaataagattcttcttttacaaacaaagaaaaacaatgttaactgatttaattattccacgtgtggacagtgtatgtctcttattttaattaactaatctgaaagttatattggcaagcaaattctccacttaaaatccattttttagcacattaaaaatagcaacttttggccaggggtgatggctcatgcctgtaatcccagcattttgggaggctgaggaggtggggatcatgcggtcaggagttcgagaccagtctggccaatatagtgaaaccccatctctactaaaaatacaaaagttagctgggcatggtggcgcatgcctgtagtcccagctacttgggagactgaggcagaagaatcacttgaacccaggaggcaaaggttggagtgagccaagatcacaccactgcactccagcctgggtgacagaatgagactccatctcagaaaaaacaaaacaaaacaaaacaaaacaaaacaaaaccaaccaactttctcatcagaacctacaaaataccatgtaaaataacatggtaggaagacaactgagacaattgtagctgtaacacagaaaaagaattagaagaactgtgatgcatacatacttgaaatgaatatatgacaaacaaaactgaacataattaaaaaataaagaagcagaatttctctttaaattcagcaagagtaaactttgcatcctgggaaaaatgtcctctcaacatgaggaatcaatgtaatttcttctccattgatattttccattctgacttaaagttacaaactaactccaggaggaatacttatggcttatcatgaagcatctgctacacagcaagcactgccatgtttgtttgctgcatttatatacaaaaacatcctcttgacttatcgaagccttcctagtacttacctgaacaaacttgctcagtaaataaacttatgacaattttaaaaatagagaagaacaataaccaagtaaaagtgagcttatatagggttctccaagtaaaagaaataaatgaaatcttctaactaaataaaatataacttaatacactaattgtggaattacatctaaaaatcatttcatgtacactactaaatttcataaaaattattcttatactccatgaccagctcacataatgtatacttcataaactacaaaacaatatatgatatatatgagatatatatgtgatatatatatgagatatatatgatatatatatgatatatatatgagatatatatgagatatatatatgatatatatatgagatatatatgatatatatatgagatatatatatgatatatatgagatatatatatgagatatatatgatatatatatgaaatatatatatatgacatatatatatgaaaaaagaaaattgtgggtcttgcattgagtaccaggcaagtaaaaacaaagaaatttcatggggagattctgaaccataagatgtaagattttacagtaatgaattcaatacaaaccagagagtacagatttgctttccagattttttaggtttttggttttctagtaaattagtcaccttattacaataatttgttctgttctaataattttttttctgaaaataggtacaaactcataattacacaaacacacttacttcataattttcttctaaggtatagctttagagtaatatatatgtatgtttaaccctatgtaaataaaaactaaaagtctgcatggggctaccccctttgggtcccctccctttgtatgggagctctgttttcactctattaaatcttgcaactgcacactcttctggtccatgtttgttatggctcgagctgaacttttgctcaccatccaccactgctgtttgctgctgtcacagacctgccgctgacttccacccctccagatccagcagggtgtctgctgtgctcctgatccagcgaggtgcccactgccaatcccaatagggctaaggcttgccattgttcctgcatggctaagtgcctgggtttgtcctaattgagctgaacactagtcactgggttccacggttctcttccgtgacccacggcttctaacagagctataacactcactgcatggctcaagattccattccttggaatctgtgaagccaagaaccccaggtcagagaacaagaggcttgctgctatcttggaagcagcccgccaccaccttgggagctccaggagcaaagaccccttcatggcaaccacgaagggacctctaaagcagtgagtaaaattggaccactttcaccttgctattctgtcctgcccttccttagaattggaggaaaatactgggcacctgtcagccagttaaaaacgattagtgtggccgccggacttaagactcaggtgtgaggctgtctgggaaagggctttccaacaatccccaacccttctggattgggagcgttggtctgcctggaaccagcttccactttcaattttcctgaggaagccgagggctgactagaggcagaaagctgtcgtcccgaactcccagcgttagccgattgagatcatggtgcagccagaagtctctactcaacagtctcccatgcgtgcacccctacctttccttctgacccatatctcctgggtcctgactatgactttcttgaaagtgtagccccaaaattctccttatctctgaatctacttcctctgatccctgcctcctaggtactaatggttcagattttcatttactctagcaagttgtatctccaaagggatgtaaggaagctctacactgtgtccttaggcccctaggctatgaacccacaaagtcttgtccctggtgtccctcccaatttaggtatacagctctcagcatgggcagttacacaggacctgttccccaccacccttgccagggccccaagtttgtaaagagctaggagaaaagagagagagacagaggggagagaaagagagagagacaaagagggagaaagagagagagacaaagagggagacagagagagagagacaaagagaaagatagaagtagtaaagaaaaaacagtgtgccctattcctttaaaagccagggtaaatttaaaacctataattgttcattgaaagtcttctctgtgaccttataacactccaataccacttggctgtcagtgtaaacaagggcgtagccctaaagcactgaggccactgacaacccatagccttcctatcaaaaattcttaacccagtaacccatggatgggacaaatgcattcagtcagtagtggcactgctttgctataagtagaaaaactttagagggaacctcattgtgagcacaccttgccagttcagagctatcctaagtcaaaaaaaaaaaaagcaaaaaggtagcttactaactcaaatcttaaagtatgggactattctgttagaaaaaggtgatttaacattgaccactgaaaattcccttaacccagcagatttcctaacaggggatttaaatcttaattaccatacaaaggtccaaccagacctaggaggaactccctcatgacaggaccatagatggttcctcccaggtgattgaggaaaaaaaaaaaaacacacacacacaatgggtattcagtaattgaggtaaactcttgtagaagcagagttaggaaaattgcctaataactagtctgctcaaacgtgtgagctgtttgcactcagccaagccttaaagtacttacagaatcaaaaaactctatctcggtcctgactcaaaaggttacccacaccctctctgaagtgaatttgcatatgaactgttgtttgtaggaatgcatcttgatggggcatctgggttgttatgaaatattcaggaaccccgcctagctctagaactcacctatgagcacaaagtcaacattaggcatgctggtaaaggaccactagaatccagcagcccagacccctttctttgtggtcaagaaaggtgggaaaacaggtgcagaactgctacatcagtaaacgtaactaatccaataagcagaagtccatggggttacacactctggaaaggaataagcattaggaccatagaggatgctgcaggactaatgctcatcggaaaatgactaagggtactagcatccttatgttttttttttcagatgggaaacattccctccaaggcaaaaatgcccctaagatgtattctggagaattcagcccagtcagggtatatgtacctttttccctgtcagacttgaggcaaactgaaatagccctaggtaaattatcagataaccctgatggctatattgatgttttacaagggttaggacaatcctttgatctgacatggagagataaaatgttactgttagatcagacactaaccccaaatgagagaagtgccaccataactgcagcctgagagttcggtgatctctggtatgtcagtcaggtcaatgatagtatgacaacagaggaaagagaatgattccccacaggccagcaggtaattcccagtgtagaccctcattgagacgcagaaccagaacatgtagattgatgctgcagacatttgctaacttgcatgctagaaagactaaggaaaactaggaagaagcctattaattattcaatgatgtccactataacacagggaaaggaagaaaatcctactgcctttctggagagactaagggaggcattaaggaagcatatctctctgtcacctgactctattaaaggccaactaatcttaaaggataagtttatcactcagtcagttgcagacattagaaaaaaacttcaaaagtctgccttaggcctggagcaaaacttagaaaccctgttgaacttggcaacctcggttttttataatagagatcaggaggaacaggcagaatgagacaaatgagattaaaaaaaaaaaaggctttagtcatggccctcaggcaaacagactttggaggctctggaacacggaaagcctgggcaaatcaaatgcctaatagggcttccttccagtgtggtctacaaagacactttaaaaaagattgtccaaatagaaataagccaccccctcatccatgccccttatgtcaagggaatcactggaaggcccactgccccaggggatgaaggtcctctgagtcagaagccactaaccagatgatccagcagcaggactgagggtgcccggggcaagcgccagcccatgccaccaccctcacagagccccgggtattcttaaccattgaaggccaggtggttaaccacctcctggacactggcgtgtcagtcttactctcctgtcccagacaactgtcctccagatctgtcactatctgagggttcctaggacagccagtcactagatacttcttccagccactaagttgtgactggggaactttactcttttcacatgcttttctaattatgcctgaaagccccactcgctttttagggagagacattctagcaaaagcaggggccattatacacctgaacataggagaaggaacacctgtttgttgtcccctgcttgaggaattaatcctgaagtctggaaaacagaaggacaatataggcaagcaaagaatgcccgtcctgttcaagttaaactaaaggagtccacctcctttccctaccaaaggcagtacccctttagacccgaggcccaacaaggactccaaaagattaaggacctaaaagcccaaggcctagtaaaaccctgcaatagcccctgcaatcctccaattttaggagtacaggaacctaacggacagtgcatgttagtgcaagatctcaggattatcagtgaggccgttgtccctctatacccagctgtatctaacccttatactctactctgctttcccaaataccagaggaagcagagtgttttacagtcctggaccttaaggatgcctatttctgcatccctgtacatcctgactctcaattcttgtttttctttgaagatccttcgaacccaacatctcaattcacctggattgttataccccaagggttcagggataacccccatctatttggccaggcattagcccaagacttgagccagttctcatacccggacactcctgcccttcggtatgtgaataatttacttctagacgcccattcagaaaccttgtgccatcaagccaccaaagcgcttttaaacttcctcaccacttgtggctacaaggattccaaaccaaaggctcagctctgcttacagcaggttaaatacttagggctaaaattatttaaaggcactagggccctcggtgaggaaagtatccagcctatactggcttatcctcatcccaaaaccctaaaagcaactaagagggttctttggcataacaggcttctgccaaatatggtttcccaggtacggtgaaacagtcaggccagtatatacactaagtaaactcagaaagccaatacccatttagtaagatggacacctgaagcaaaagaggctttccaggccctaaagaaggccctaacccaagccccaatgttaagtttgccaacagggcaaggcttctctttatatgtcacagaaaaaacaggaatagctctaggaatccttacacaggttcaagggaccagcttgcaacctgtggcatacttgagtaagaaaattgatgtagtggcaaagggttggcctcattgtttacaggtagtgacggcagtagcagtcttagtatctgaagcagttaaaataatacagggaagagatcttactgtgtggacatctcatgatgtaaatggtatactcactgctaaaggaaacttgtggctgtcagacaaccatttgcttaaaaatcaggctctattaattgaaggactagtgctgagactgcgcacttgtgcaactcttaacccagccacatttcttccagacaatgaagaaaagagagaacgtaactgtcaacggtgattgctcaaacctatgtcactcaaagggaccttctagagattcccttgactgatccctacctcaacttgtatactgatgaaagttcctttgtagcaaaagggctttgaaaagcagggtatgcagtggtcagtgataatggaatacttgaaagtaatcccctcactgcaggaactagcgctcagttggcagaactaatagccctcattcgggcactagaattaagaaaaggaaaaagggtaaatatatatacagaatctaagtatgcttacctagccctccaagcccacacagcaatatggagagaaatggaattcctaacttctgagggaacacctatcaaacatcaggaagctattagattattattggctatacagaaacctaaagaggtggcagtcttacactgctggggtcatcaaaaaggaaaggaaagggaaatagaagggaaccgccaagcggacattgaagccaaaagagatgcaaggcaggaccctccattagaaatgcttatagaaggacccctagtatggggtaaccccctccaggaaaccaagccccagtactcagcagaagaaacaatggggaacctcacgacgacagtttcctcccctcaggatggctagccactgaagaaggaaaaatacttttgcctgcagctaaccaatggaaattacttaaaacccttcaccaaacctttcccttaggcattaatagcacctatcagatggccaaattattatttactggacaaggcctttttaaaaccatcaagcagatagtcagggcctgtgaagtgtgccaaagaaataatctcctgcactgcaggccatacatttcaattcctgtatctttaacctccttgttaagtttgtctcttccagaatccaagctgtaaagctacaaatcgttcttcaaatggagccccagatgcagtccatgactaagatctaccgtggacccctggaccggcctgcaagcccatgctctgatgttgatgacatcaaagccacccctcctgaggaaatctcaactgcacaacccctactatgccccaattcagcagaaagcagttagagcggtcatcagccaacctccccaacaggacttgggttttcctgttgagaagggggactgagagacaggactagctggatttcctaggccgactaagaatccctaagcctagctgggaaggtgaccgcatccacctttaaacacggggcttgcaacttggctcacacccaaccaatcaggtagtaaagagagctcactaaaatgctaattaggcaaaaatgggaggtaaagaaatagccaatcatctatcccctgagagcacagggggagggacaatgatcaggatataaacccaggcatttgagctggcaccagctaccctctttgggtcccctccttttgtatgagagctctgttttcactctattaaatcttgcaactgcaaaaaaaaaaaaaaaaaaaaaaaagtctgtaggtatgtgtttgcaggcacagtggccacatgttcaaagaaaaatagatgacaaattaaaaaaaatatttactcaggacccagatatgtatagattttatttacattcctatatgatttttattatgaccacaaaaatgacgctataataaagataacaatttagttttatatttcaaagtgactaaaagtgtagatttggattgcttgtaattcaaggaataaatgttgaaggtgaagaatccctcatttaccctgacgtgattattacatattttatgctggtatcaaaatatgctatatatggcagaaatatatctacacactatgtacccataaaagttaagaaaaataagtttaaatttgtcaaggcaaaaaaaaaaagaagtttaaataagattaaaagtataaaaatgtaacctacgagaacaatattctttaatttatttgcaggttaaagccactgaaaaaaagagattactagagatgttattccactcttaccaaatagtaaactgttgccatctcttacctacacccttgagtaaggtgggataggttaaagcgagtggcataataacacttcattgaatgtacaacagacttaacatgtcaaaaaatgtttaaaaaattaagtttacatataatctaaaaatttatgaatgtactacattacataaaagcacaactaatataatacatcactaatttaattttaattttaactaaaattttaaaatgtttttctcactataatgcacaaaaatatattcctcagaacacctacctcatacatcactcaatattttaagttaaccacaaaaagcctctccatttagatttttatcatgcattttatattttaatatcctttctcttttatgaaaaaggtcataaataatgcccatctaataaaaaagaatctttcatatctctgatgcagcaacaattgatcgcatgctttcacatgtaaataaagtaggaatgaagagcatgaagtaacttgagagttgaattacatccttatttgcttttcagagtctgtaatttttttcaatattgtgatgttaatttttttgatatttgaagtatacaaaaagtatacttcaaatgtaattataattctccaaaaaatcacctcctcttttttaagttatatgcaaataacttatctaaattttagattgaaattattttttttactcaacactctgatttagtgtagtctgaagtgccagtgccttatcatttctactgtgaattctctgacatttacagagttaattttggattgaatatttttcatatttactgcatctacaaaaaaaacttactctgttttctaagctgtagtttataaacttttttccaaatttattacatttgcaggtttttttctctattatacattccctgatattgaacaaagtttgagcaactttagggtttttctctagcacaaaatatgcacaataagatctgtgatacaaatatagtactacaaccgtctttatatttgtaatgtttgtcatcaaaagaaatactcttcaccattctaaggtttatattttctaaaagatattctcacagtaattgcatttttaatatttgttttaagtataaactctgtgatgttaagatgtgagcagatattaatggcttttccacattcttcataggtgtacattttttttcaagtataaatgctttcctatgcgataaggtgtgagtattggttaaatattttgccacattcttcatagttttctctaggataaattagcttatactcaagtgtgacaaccatttaaaggctttgtgacatgactcacatctagggcttcttgacactatgatttcttttatgtttagaaaagtttaaggtgttctcaagagcactgtcatgtcttttaggtttgtagagcttctctccagtatgatttgataacttattaaaaactttgccacattcgaccgggctcaatggctcatgcttgtaatcccagcactttggggcactttgggaggccaaggcgggtggatcacttgaggtcaggagttcaaaaccagcctggtcaaaatggtgaaaccccgtctctactaaaaatacaaaaattagctgggcgtggtggcaggcgcctgcaatcccagctgcttgggaggttgaggccagagaatcgcttgaacccaggaggcggaggttgcaatgaactgagattgcaccattgcactccaatttgggcgacagagtgagactccatttcaaaaaaaaaaaaaaaactttgccacattcttcacatttgtagaatttctctacaacataaattatcttatgtgtaataagggttgaaatgtttttaaagcttttgtcacattcttcatatttataaaatttatcttctgtatgaattctcttatatttagtatgagttgaagaccagttaaagactttgttacattcttcacatttgtcgggtttctcttcagtatgaattatcttaatgtgtggtaagatgtgagaaatggttacagtgtttgccacattcttcatatttgtagggctagtttccattatgaattatcttatgttcagtaaggtttgaggacgttaaaagctttgcaacattcttcacgtttgtagggtttctcttcagtataaattgtttattaagaattgaagaattaggctgggcacggtggctcacgcctttaatcccagcactttgggaggccgaggcgggcagatcaccagaggtcgggagttcgagaccagcttgaccaacatggagaaaccccgtctctactaaaaatacaaaattaggtgggcgtggtggcacatgcctatagtccctgctactcgggaggctgaggcaggagaatcgcttgaaaacccaggaggcggaggttgcagtgagccgagattgtgccactgcactccagagcctgggcaactagggcgaaactctgtttcaaaaaaaaaaaaaaaaaaattgaagaatgcttatggcattattcacatttgtagggtttctctcccattgaattatgttgtttagcaagagttgaggactggctaaaagcattgccactttcttcacatttgtagggtttttctccagtacgaattttcttatgtctaataaagtttaactgattaaaagcattgccacattcttcacatttctagagtttgtcttcagtatcaactattttctgttgagtaaggtctgaaaaccagttaaaagctttgccacagttttcatatttgtagggtttctcttcagtatgaattatcttatgttcagtaaggtttgaggaccagttaaaagttttgccacactcttcacatgaggcgggtttctctctaatttatcttatattcagtaagatctgagaacccgttagaagctttgccacattcttcacatttgtaaagtatctctccagtatgaattatcttatgttcagtaagttttgagaagcagttaaaagttttgccaaattctttaaatttgtagtgttcctctccaagataaattattttatgttgagtaaagtttgaggactggttaaaagctttgcccattcttcatatttgcagtgtttgtctctactatgaattatcttatgttcagtaagatttgaggactgattaaaagctttgccacattcctcacatttgaagggtttatcttcagtatgaattatcttacattcagtaagatttgaggaccagttaaaagctttgccatattattcacatttgtggagtttatcttctttaggaattctctcattttgagtaacagctgagcaatggttaaaagctttgtcacctttattatatttgtagggttttcctccagtatcaattattttatgtgtatttaaggtgtgaggactggttaaaggctttgccacattctttacatttgtggggtttctctccagcatgaattgttttctgcctattaaggcttgaggactggttaaaagctttgccacattcttcacatatggagggtctgtctctagtataaattatcttatgtgtattaaggtttgtaaaatggttgaaagctttgacacattcttcacatttttagggcttctccccagtatgaattatcttatgtttagtaagggctgaaagatggttaaaagctttgccacattcttcacatttgtaggttttccctccagtatgaattgttttatgttgagtaaggtgtgaggactggttaaaggctttgccacattcttcacatttgtagggtttctctccagaatgaattatcttatgtttagtaaggtttgaggactaaatgctttaccacactcttcacatttgtagggtttctttccagtatgaattatcctatgtttagtaaggcgtgagaaatggctaaaagctttgccacgttcttcacatttgtagggtttctctccagtatgaattgatttatgtttagtaaggtgtgaggattgcttaaaagctttgccacattcttcacatttgtacggtttctccccagtatgaattatcttatgtttcataagggtcgagaaattgttaaaacctttgccacattcttcacatttgtacggtttctccccagtatgaattatcttatgtttcataagggttgaggaattgttaaaagctttgccacattcttcacatttgtagggtttctttccagtataattatctcatgttttctaagggctgagaaatgcttaaaagctttgccacattcttcacatttgtagggtttctctacagtatgaattaccttatgttccataagttttgagaccacttaaaagctttaccacattcttcacatttgtatggtttctccccagtatgaattatcttatgtttcctaagggctgagaaattgctaaaagctttgccacattcttcacatttgtacgatttctccctagtatgaattagcttatgtttcttaagggttgaggaattgttaaaagcttttccacattctccacatttgtagggcttctccccagtatgaactgctttatgtctagtaaggtgtgaggactgcttaaaagctttgccacattcttcacatttgtatggtttcttcccagtataaattatcttatgtttcctaagggttgaggaattgttaaaagctttgccacattcttcacatttgtagggtttctttccagtatgaattatctcatgttttctaagggctgagaaatgtttaaaagctttgccacattcttcacatttgcagggtttctctccatatgaattaccttatgtaaagtaagttttgaggaccactgaaaagctttaccacattcttcacatttgtaggatttctctccagtatgaattatctcatgttttctaagggttgaggaattgttaaaagctttgccacattcttcacatttatagggtttctttccagtatgaattatcttatgttttctaagggctgagaaatgcttaaaagctttgccacattcttcacatttgcagggtttctctgcagtatgaattaccttatgtacagtaagttttgaggaccacttaaaagctttaccacattcttcacatttgtagggtttctctccagtatgaattatctcatgttttctaagagttgaggactggctaaaagctttgccacattcttcacatttgtagggtttctttccagtatgaattatcttatgtttcctaagggctgagaaatggttaaaagccttgccacattcttcacatttgtagggtttctcttcagtatgaattactttatgtctagtaaggtgtgaggaccacttaaaagctttaccacattcttcacatttgtagggtttctctccagtatgaattatctcatgttttctaagggttgaggactggctaaaagctttgccacattcttcacatttgtagggtttctttccagtatgaattatctgatgttttctaagggctgagaagtggttaaaagctttgccacattcttcacatttgtagggtttctccccagtatgaattgctttatgtctagtaagatgtgaagattgcttaaaagctttgccacattcttcacatttgtatggtttcttcccagtatgaattatcttatgtttcataagggttgaggaattgttaaaagctttgccacattcttcacatttgtagggtttctttccagtatgaattatcttatgttttctaagggctgagaaatgcttaaaagctttgccacattcttcacatttgcaaggtttctcttccatatgaattaccttatgtacagtaagttttgaggaccacttaaaagctttaccacattcttcacatttgtagggtttctctccagtatgaattatctcatgttttctaagggctgaaaaattgctaaaagctttgctgcattcttcacatttgtagggttgctttccagtatgaattatcttatgttttctaagggctgagaaacgcttaaaagctttgccacattcttcacatttgcagggtttctctgcagtatgaattaccttatgtacagtaagttttgaggaccacttaaaagctttaccacattcttcacatttgtagggtttctgtccagtatgaattatctcatgttttctaagggctgacaaattgctaaaagctttgccgcattcttcatatttgtagggtttctcttcagtatgaattatctcatgttttctaagggttgaggactggctaaaagctttgccacattcttcacatttgtagggtttctttccagtatgaattatctgatgttttctaagggctgagaaatggttaaaagctttgccacattcttcgcatttgtagggtttctctccagtatgaattgctttatgtctagtaaggtgtgaggattgcttaaaagctttgccacattcttcacatttatatggtttcttcccagtatgaattatcttatgtttcataagggttgaggaattgttaaaaactttgccacattcttcacatttgcagggtttctttccagtatgaattatcttacatttagtgaacattgaagagatgttaaaagctttgccacatttcttatatttgtagggtttgtcttcagtatgaattatcttatgtttaataagggttgagaaccatttaaaggctttgccacgttcttcacatttgtagatattctctctagtatgaattctcttatgttgaattaagtgtgaaagcatgaaaaatgatttgctacatttcatacatttgaaagttttctttttagtgtgtctaatcttatatctatttgaatttgaatatttatgaaagactttcacatatttgttacactgaaatatttttccctgggtagttgtccaacattggttaagtttattataagcttcttcgtgcatcttaccctcattgacactttcacaatcttttcttaatcgtaaattcttatgtccacatcttgcatatgttctcaatattatttcttggaaagaatcttttatgctctgatctggccaaaagtcttgtgtaaaatgagaactaataactggaagaaatgaaaataataaattatgtcacttgctagactcagatgaatatactttacaaatctaacctataaaattatacaaaccgcttaagcaagatggcacagcaaaataagacaggccctaatttcttcatagacatataaatgtaataaaaacatactgaccaaaatatatttgttgaaaatttataaataagttaagtgtgtagagtgccccaagtaagtacaatgcaaacagccacataaaaggaaagagaagtctgttacagtttcccaactcagctcttcctgctccccaaaatgacatggtgtcgttagaagtaaattgctggctgggaatggcagctcacacctgcaatcccagcacttttggaggctgaggcaagtggattacctgagatcaagggttcaagaccagcctggccaaaatggaaaaactccatctctactaaaaattcaaaaattagccaggcatggtggcacacgtctgtagtctcagctacttgggaagctgaggcaatcacttgaacttgggatgtagaaattacagtgagatgagattatgctattgtactccagccagcgtgacacagtgagactctgtctcaaaacaaaaaaagtaaattgccatctcctgatttcatttctaaagacatataaaacagtggcacatacatatttatttctggcttctaggggcctttccagactggtttatgtttctcatgacacaaagtactgaaagaaatggtggcatactttaaaatgacagcttgaggccgggcacggtggctcaggcctgtaatcccagcaccttgagaggcctaggtgggcagatcacgaggtcaggagatcgagaccattctggctaacacggtgaaaccgcgtctccactaaaaatacaaaaaattcgccaggtgtggtggcgggcatctgtagtcccagctactcaggaggctgaagcaggaaaatggcatgaacccgggaggcagagcttgcagtgagccgagatcatgccactgcactccagcctgggcgacagagagagactctgtctcaaaaaaaaataaatgaataaaataaaatggcagcttgaatctgctgaaaccaaagttaaatattacagcagcagagaatgtagtaccacacacaaaaaatagattactattgagaagaaacatgagtaacattctttatctaaaaaaaaaaaaaaaaaaaaaatttcaaacaagatgcattctaagaacatgtttgacatactcccagaatctctagccaagacaattggtttcagatttccaggacaaggctacattatgaagactgtaacaggtagcttttttgatgtacaaattttaattaattattataatgtatatggaatactagggcaacatggcccaatcaaaaaaagtataaaatttttggaaaacaaccataaaacaatgaagattaataaattaatttttaaaatttcaaataaattaaataatactgaataagagacataggaacacagaccactataaaaaattttaaaaatgaggatacctcttcccctaatggcgtgaggtaattcatgaaaatggcttgctattcacctaagccagagaatcccgcaatatcatgctaaacaagaggttcataagagctattcttatataagacaaaataaactttaaagcaacagcagtttaaaaaaacaaagagggacattatacaatggtaaaaggtcttgtacaacaggaacatatcacaatcctcaacatatatgcacctaacactgaagctcccaaatttataagacaattactagtagacctaataaatgagatagacaccaacacaataataatgaggacttcaatactccactgacagcactagacaggtcatcaagacagaaagtcaacaaataaaaaatggatttaaactataccttggagcaaatgcacttaacagatatatacagaacattccatccaataactgcagaatatacattctactcaacagtgcacgaaaccttctccaaatagaccgtatgataagccacaaaatgagcctcaataaatttaagaaaatgaaattatatcaaacactctctcagaccacagtggaataaaagtggaattcaactacaaaaggaaacttcaaaaccatgcaaatacatgtaaattaaaaaacctgctcctgaataatcattgggtcaaacatgaaatcaaaatggaaatttaaaaattcttcaaactcaacaacaaaagtgatacaacctatcaaaacctctaggatacagcaaaggagatgctaaaaggaaagttcatagtcctaaacacctacatcaaaaagtctgaaagaacacaaaatgacactcttgttcacacctcaagaaactagagaaacaaggacaaaccaaacccaaacccagaagaagaaaaaaaaatagtcacagtcagagcagaatgaaatgaaattgaaacaaacaaacaaaaaccaaaagataaataaaacaaaaacctggctctttaaaacgcataaatacaattgatagaccattagcaagattaaccaagaaaaaaagaaaatccaaataacctcaataagaaatgaaatgggagatattacaactgacaacacagaaatacaaaagatcattcaaggctactatgaacacctttaagtgcactaactagaaaacctaaaagaaatgaataaatttctgcaaaaatgcaacccacccagcttaaatcaggaagaattagataccctgaacagaccaataatgagcagcgagattgaaatggtaatttaaaaattaccaagaaaaaaatgtctaggaccagacagtatgcagcagaattctaccagacattcaaagaagaattgataccaattctattgacactattccataagatagagaaagagggagcccttcctaattcattctatgaagccagcatcaccctaataccaaaaccagaaaaggcattaatcaaaaaagaaaaccacagactgacgtccctgatgaaaatagatgctaaaatccttaacaaaatactagctaactgaatccaacaacatatcaaaaacagaatccatgatcaagtgggtttcataccagtgatgcagggatggtttaacaaatgcaagtcaataaatgtgatacaccacataaaaagaaataaaaacaaaagtcacaggatcatctcaatagatgcagaaaaagcattcaacaaaatccagcaacgctttatgattaaaactcttagcaacactggcatacaagggacatacatcaagataataaaagccatctatgacaaacccagagccaacataatactgaatgaggagaagttgaaagcattccctctgaggactggaacaagacaaggatgcccactttcaccccacttcttcaacatagtactggaagtcttatccagagcaagcagaaaagagaaaaaaataaagggcatcaaaattggtaaagaggaagtaaagctgtcactgtttgcggatgatatgattgtttactttgaaaaccctagacttttcaagaaagctcctagaagtgataaaataattcagcaaagttttcagatacaaaattaatgcatacaaatcagtagctcttctatacaccaacagcgacgaagcagagagtcaaatcaaaactcaaactcttttacaatagctgtgagaaaaaaaaaaaattaggaatatacctaaccaaggaggtaaaagacctctacaaggaaaactacaaaacactgctgaaagaaatcacagatgacacaaacaaatggaaacagtccacgttcatggataggtagaatcaatattgtgaaaatgaccacactgccaaaagcaatctacaaattaaatgcaatttccatcaaaataccaccgtcattcttcacagaattagaaaaaattattctaaaatccatatggaacaaaaaaagagcctgcatagccaaagcaagactaagcaaaaagaacaaatctgaaggcatcacactacctgacttcaaactatactataaagccatagtcacaaaaacagcatggtactggtataaaaataggcacataaaccaatggaacagaatagagaacccagaaataaacccaaatattacagccagctgaacttcgacaaagcaaacaaaaacataaagtagggaaaggatactcttttttttttctttccttttttttttttttttttttttgagatggagtcttgttctgtcacccaggctggagtgcagtggtgtgatcttggctcaccacaacttctgcctcccgggttcaagcaattctcctgcctcagcctcccaagtagctgggattacaggtgcctgccactgcacctggctaatttttgtatttttagtagagatggggtttcatcacattggccaggctggtcttgaactcctgacctcatgatccacccgtctcagcctcccaaagtgctgggattacaggcatgagccaccgcgcctggccagggactcttttcaacaaatgatgctgggataattggctagccacatgtaggagaataaaactggatcctcatattttactttatacaaaaatcaacacaagatggattaaggacttaaatctaagacctgaaagtataaaaattctagaacattggaaaaacccttttagacattggcttagacaaggatttcataatcaagaacccaaaagcaaatgcaattaaaacaaacataaattagggagggttttctctctatcttgtggaatagtgtcaaaacagggacttaattaaactaaagagcttttgcatggcaaaaggaacaccagagtgaacagacaacccacagagtaggagaaaatcttcacaatctatacacctgacaaagaagtaatatcttgaatctacaatgcactcaaacaaatcagcaagaaaaaaaaaaatcccatcaaaactgagctaaggacacaaatagacaattttcaacagaagatatacaaatggccaagaaacatatgaaaaaatgctcaatattgctaatggccagggaaatgcaaatcaaaaccaccaaaggataccaccttactcatgcaagaatggccataataaaaaataaataaataaaaaaacagatgttggtgtggatgtggtgatcagggaacacttctacactgctggtgggaatgtaaactagtacaaccactatggaaaacagtgtggagattcctaaagaactaaaagttgtactaccatttgatccagcaatcccactactgggtatctactcagaggaaaagaagtcattatatgaaaaagatacttacacacacatttatagcagcgtaattcacaacagcaaaatcatggaaccaacccaaatgcccattaaccaatgagtggataaagaaactgtgagatatatatataatggaacactactcagccataaaatggaataaattaatggcattcacagcaacatggataagattagaggctatccttctaagtgaagtaaatcagaaatggaaaaccaaacatcgtatgttctcactgatatgtgggagttaagctatgaggatgcaaaggcataagaatgacacagtggactttggggacttggggggaagagtgggaggaaaacgagggataaaagaccacaaatagagtgcagtgtatacagctcgggtgatgagtgcacaaaaatcccacaaatcaccactaaagaacttactcatgtaaccaaacaccacttgtacctcaataacttatgaaaaaataaaataaataaaaaaaaataaagtagtacacaggttacttgaagacgaaaaaaaagagctttccaaattttgatgtaataaaaaaaattcttaatccataatacttgatcagaaattattttactttaaaaaacaataaaaaataaagactttccaaaatgaaaggtaagggtgttcatcaccactagcacagttaaaaaaaaaagctacatggtggccaggcacagtggctcatgcctgtaatcctacacctttaggaggccaaggtagtcagaaaacttgagaccaagagttcaagatcagccccaaaacagagtgagactgtgcatatataacaagagaaatgctaaaatgagtcttttatgttgaaaaataaaatgatgctagacagcatcaaaaaaccgtatatgaatatatagctttctattaaatgtaaacatacagacacatataaaatgtcttactataataataggcataatacccttaaaattcttctatagaatataaaaacaaaatataaatctgcataaatctgaatacacaatataaaataatttgtaatattaataacaaacttgaaaatatagaaatatagtttttgtattcaattaagttgttatgatattaaaacacattgatttaatcttaagatgttttacataatgtccatttttcaacataactacaaaaattttatagaaactacgcaaaacaaaataaaaaaaataagcaaagtgtgccactacaaaattaaacaaaaaatagttaaacaagaaatgagacaaaatatgtaaaaaaaaaaaaaacataaaacataacaatgaaactggtatgtaactttatttcttttcttttctttttttttttgagatggagtctcgctctattgcccagggtggagtgcggtggcacgatctcagctcaccacaacctacgcctctgggttcaagtgattctcctgcctcagcctcccaagcagctaggactacaggcacgtgccaccatgcctggataatttttgtattttcagtagagacggggtttcattgtgttggccaggctagtctcaaactcctgacctcgtgatccacccacttcggtctcccaaagtgctgggattacaggcatgagccaccgtgcccggcataactttatttcttatttctttttttttttttgagtcggagtttcactgttgttgtccaggctggagtgcaatggcgccatctcggcttaccacaacctccgcctcccgggttcaagcaattctcctgcatcagcctcccgaatagctgggattacaggcatgcgccaccacgcccggctaattttatatttttagcagacatagggtttctccatgttggtcaggctggtctcaaactcccaacctcaggtgatccgcccacctcggcctcccaaagtgctggaattacaggcgtgagacaccatgcctggcgtaactttctttaagaaatcattttaaatataaatttatcaaactacttaataaaaagaaatgtaattccaggactttcggaggccaaggtgggctgataacttgattccaggagtttgagaacagcctgagcaacaaagcaaaaccctgtctctaccaaaaaaaaaaaaaaaaaaaaccaaaaaactagctgggtttaatggcatgggcctgtaacccagctacttaagaggttgaaactagaagattatctgagtttgagaggctgaggctgcagttcactgccatgattacaccattgcaaaacagcctggttgacgaagtgagaccctatttcattaattaattaattaaaaggaaaagaaagaagatgcctgagtggcttaagaaaagaagcatacaatatgttctctacaagagaccaattttagcactgagtcaaatagtctgtaagtaacagaatttaaaaaaatctatatttcatgcaaatagtagccacaattgggtgaggtagtcgtaattatattgggcacaatatgctttaagtcaagtactagtacaagaaaaagattgatattatataatagtaaaatgggtcaatttaccaggaatctataactattatatttatatgtacaggtaggtataacaacaggcctccaaaatatataaatattgacataggtgaagcaagaagtacatagcaacataacagttgcagacactgagaccccattttcaataataatagaaaattcatatagaagattaagaaaatagaaaatgtagataacattatggactgtaatattttacatacagagaaatatctgagagtaaataatttataacagaaaagtttatttggctcacagttcaacagactgtacaagaagtatatgccggtatctgtttctggtgtgttctcaggaagcttatgatcatagtggaaagcgaagagaaactggacatatcacatggtaagagatagagcaagtgtgaggtaaaagagccaggttttttaaaaatagtttctcaaaactatacagatatttgtgtgtccccaatatggaaaagcagtcagattgtgcagtcccttatatgccatgaacacaactttggctctcactgtaaacttgaagggaaattaccaaaacgaaaatagaatccttagagaattttaaagcataagacagaagatgccctacatgagagcaaaattttaaaaaatctcagtcttcccagaaactacttcctttggagcacagcttctcaggtcacattttgagaactggctttctcctggacctctggacctcttatttgtgttgtttcttgtattcactctcacatacctgggggtttagttaccatctcatgtctcttcatattccaaggctctttcccttgcttcagacaagttatcaagtctagcttagagacagcgatacctgttttattaaaaataaataacataaatattgctcatattccccaaataatgtgctcattaaagagaatgtaatagaatattctagtaaattgatccctcaatactaatttataacataaatttctaaatatttagaaaatattttcaatttgtacagtcccttaattttactacctggtactactgaatcaaatattggtggtggcaatgagatttcaaggtgtggcaactacattttatgccactaaatttcttcaattttcactaatctagagtgaaaaatgcagatctgcttagaaatgtggaaagttcaggtaaaaattaaacatctttaaaaaattcctttctggccgggcatggtggctcacacctataatcccagcactttgagaggccgaggcaggtggatcacctgaggtcaggagttcaagaccagcctcaacatggagaaaccccgtctctgctaaaaatacaaaattagccgggtgtggtggtgcatgcctgtaatcccagctactcaggaggctgaggcagaagaattgcttgaacctgggaggcggaggttgtggtaagccgagatcgcaccattgcactccagcctgggcaacaagagcgaaactctgtttcaaaaaaaaaaaaaaaaattcttttctacactttcaaatccctgttttcagaaaacgggtatctgaaacttatttatgctaagcataaatcaccaaaacacatcctacagaaaagagaaatgaaacctatagaatataataggaattgcttaattaaaatcatcctcacccaggaagaccaggtttctgtagttctctaacataacattcctatataaattctgctgagccatgtccaggcattgccactcctccagagcgaattctatggtcacatcccaaaatgtcaacgatccctgaaaaacacaacaaagatacatatagatttcccaattggccatggacagaatttttaatttgactcaaggtgaaatgagagagtaaagagaacaggttctaacttacagggatgactgaacgtattcagtaaaataattttcaacacagaaatcgtctcggctgggcgcagtggctcatgcctgtaatcccagcactttgggaggccaaggcaggaagatcacgaagtcaggagattgagaccatcctggctaacacggtgaaaccccgtctctactaaaaatacaaaaaattagccggcatggtggtgggtgcctgtagccccagctacttgggaggctgaggcaggagaatggcatgaacccgggaggcagagcttgcagtgagctgagattgctgcactccagcctgggcgacagagctagactctgtctcaaaaaaaaaaaaataaagaaaagaaaaaaagaaatattctctaatgtattctcaaactctgagaaaaaaagaatggcagaagatccacaacaccagcacagacaagatacttttctggataataaagtataaaattaagggcatgataacatgtacatttttgagtgctatttttaaatcatacagaataagtcttgtacatttttcagaccaaaaagacatgttgagttagaagacacctctcaaattttaatgtgtacaattaactggagatcttgttaagcatatttattttataagatctggaataaagtctgagtttctgaatttgacaagctcaccagtaatgcctgtttttggccccaaaagaatcttttgttaaatattcagcaagtggaggagcctgtatttttcccagtttttctgccctataaacaaagacgagagccctcattttccaaagatagatatatgcagagaaaatctaagaaaggcaggtgccagattaaatgtgatcattggtgcacatcagctacataaagatacttaataacgaggagaaaaatagttaactctatactgaaaaaacctgtcagacagctttttttttttttagacagagtttctctcttgtcaccaaggctggagtgcagtggcgcgatctcgactcactgcaaccttcgcctcctgggttcaagcgattctcctgcctcagcctcccgggtagctgggactacaggcgcgtgccaccacgcgcagctaatgtttgtatttttagtagagacagggtttcaccatcttggccaggctggcttcaaactcctgaccttgtgatccacccacctcggcctcccaaagtgctgggattacaggcataagccaccgcgcacagctcagacagcactttaatcaagtcaatcattaacatcaactgcagtaggacaaatttttatgatgtgctgatgcacacagaagggcacacagaaggacacagcattactgctgtgatattgctcccccaaagtaaattataatctgaatttaaccataaagaaacatcagtttatgcaaatgtcaagacacagataactcccattttttgtaacttttaatagccattttaagcagactttctttagcacactagagagcaggtatctcctaaccatttttttcagaactttttttttttttttgagatggagtctcactctgttgcccaggcgggagtgcaatggtgcgatctcagctcactgcaacctccacctcccgggttcaagcgattctcctgcctcagcctcccgagtagctgagattacaggtgccccacaccacgcctaggtattttttgtatttttagtatagacggggtttcaccgtgctggccaggctggtctcgaactcctaatctcaggtgatccacccgccttaaagtgctggggttacaggtgtgagccactgcaacttgcctttaaaaagcattttctttttttttttttttttttttttttttgaggcagagtcttgctctgtcgcccaggctggagtgtagcagcctgatctccgctcactgcaagctcggcctcacggattcacgccattctcctacctcagcctcccgagtagctgggactacaggtgcccgccaccacgcccggctaattttttgtatttttagtagagacagggtttcaccgtgttagccaggatggtctcgatctcctgacctcgtgatccgcctgccttggcctcccaaagtgctgggattacaggcgtgagccaccgggcccagctaaaaagcattttcttaaagctgttctgcatagagctaatggagaacacagatggagcctcaacattacatgttctactttttccgtaaggaccccagcttttccccaataggaatcttgagtatccacaccttcccctattcaacaaccacaggtgaaactttttttttttttttttttttgagacggagtcttgctctgtcacccaggctggagtgcaatggcaccatctcggctcactgcaacctctgcctcccgggttcaagcgattctcctgcctcagcctcctgagtagctgggattacaggcgtgtgccaccacgcccggctaatttttgtatttttagtagagacagggtttcaccatattggccaggctggtctcgaactcctgaccttgtgatccgcccgcctcggcctcccaaagtgctgggatcacaggcgtgagccaccgcgcccagcctgctctggcacattctaaataatatgtctacctaggaaaaatctgaggaaacatagatataagttgaccgtttatttgggccaagcttgaggactgtaacctgggagcaaatattcaagttgcctgaaatatatacttgattagcagtgtgattacaagttgatttgtaaaggctaaaaaagatggacagagagtgagttgatacaaagttgtctgtcagaaatttttatttatttacaggaataacattgattattgattggatatacaccattagtttttaggtacaagttatagtgtccagtgtggcattattaatatatagctacttgtggcaatagtgaacagcttcaaaagatgaatacatagtgcaaaaaacaaaaagaaggtcgggtacggtggcttgcgcctataatcccagcactttgggaggcgggcagatcacctgaggttgggaactcaagatcagcctgacaaacatggagaaaccctatctctactaaaatacaaaattagcctggcatggtggggcatgcctgtaatcccagctattcgggaggctgaggcaggagaatcacctgaacccgggaggcaggggttgcggtgagccgagatggtgccattgcactccagcctgggcaacaagaacgaaattctgtctcaaaaaaaaaaaaaaagacagagagaaagagaattctactctcattttagtgtctctataagtttgacaactaaaaggacttgcatctctcagaaagaaagtttttcttttttctcaaatctgaaaacctggattcagaatttgaagttgcagttttaggtcctgaatggatggagtagcagcaggtgttccctgcacatctgtgggcattttaacaagaggaagaaaaaggaagtagagattcccatgtgtacatgtctactcaatgcacacatgttactgtgactgggtttctgggccccatggtctgtgaatcagtttcagatgtgaagatacaagagtcactgaaaaaggtaaaacggctgtttgctgccctgtgaagtttgtagaattctgatctagcctctctaaaagttactgtggaggactatagataccaaattggcagagaaacaattctgcctgcatatttaggggacagcatgcactttgcagcacaattgtgagttgaatgatagcctgagagggaaagtttcctctagcttaaagcttgggtggcaccttatatttttgtaacatgtctgataattctagagtttttgtgaaacataaaagacaaattttcttcagccccggagaaactccacaataatagaacagacataaaactgttgtattacacaattaaacctgaacgtgacatgcatcacagtcagtctgcttaagagactgcaaagacaaaaggatggtcaccttaattagttaacaagtagaaaatttatagcaccatgtcatacatagttattcctaaattcacctggtaattgaaaaggctagccatgtaggctaatcagttatgttcaatgacaaaataaacttttcatatcttcatgaaaggaggtaattttgcaacttgaagccaggtgcctgctgaaggtaggctctcaatctcctacaaaaatggttgaatagggtgctatctttttggctatttatattttaaagcaatggctctctactccctgagcactggggctactcctctcccgcttgcactctcctgttagctggtgtcctctcttgacccctaccatctgccattgaggcagagctcacagctgaaagctcacatcttacataaaccacaactgccacagcagcactccagtgacacctcagagagggaagcctgagctgcaggagaaaagcctgcaggcctcctggggagaactgcaccttcacattaatggaaattggaacagtaattcagcctcagtttttatttacaatggtgacatggaaaaaccactgctggatttccaacatgagtccagacagagatagctccaaaagttcccactgtgacagcccacctcttttacagacaccagggaatacttacaatgcagacacccaaagcactggacagaaaaacagctctcagtctgagcaagattatgctgagaggaaaaaagaagttaaaaccatcttaggtaaaaactcagtttagacgtaagattgatcaagtcagccagaaaatactatcttaaaaagaatttctctctcaacaagcaaaatacacaactactctcagcatgagaaacatgagcattacgaagaaaaggggcatattctcagcagaattttagaaggtttctcttccatctctgctgctctctcatctcctagccattgaatgggggttccatattgaaatacatctcacaatttccaccagcactttttgatgaagatttataatctgactttgttcatatactggaatatatttaagcttgccacatagctaactaaagagctattatggtttttgggtggccacatcatctgtgtttatttgtcctgtaatagcagcattccgatttagtgaaatgaaagacactattaacaggccaggcacagtggctcacatctgtaatcccagcactttgggaggccgaggtgggtagatcatttgaggtcaggagttggagaccagcctggccaacatggtgaaaccccatctctactaaaaatacaaaaatgagctgggcatggtggtgggcgcctgtaatctcagctattcaggaggctgaggcaggagaatagcttgaacccggaagacagaggttgcagtgagccgagattgtgccattgcactccagcctgggcgacagagcgaggatctgactcaaaattaaaaaaaagaaaagaaaaagaaaacaaaagtcagagataacacaaataaatggaaaaccattttatgctcataggtagaaaagatcaaaatcattaaaatggccatactacccaaaaacggaacagatttaatgctattcttatcaaactaccaaaaacatttttaacagaactataaaaaactattttaaaattcatatggaaccataaaagagcctgagtagccaaggcaatcctaagcaaaaagaacaaagctggaggcattacattacctgacttcaaactatgcaacagggctacagtaaccaaagccacataatactggtacaagaaacagacttatagaacaatgcaacagaatagagagcccagaaataatgccacagacctaaaaccacctgatctttgacaaaactaataagaggaatgtgggaagaaatccctatttaataaatggtactgggaaaccacctagcagtatgtagaaaattgaaactggaccccttccttacatcatatacaaaaatcaactcaagatgaattaaagccttaaatgtaaaacttgaaattataagaaacccttgaagataacctagaaaataccattttacacatgggaactaactaagattttatgatgaaattaccaaaagcaactgcaacagaagtaaaaactgacaaatgggacctaattaaattaaatatcttcttcacagcaaggaaatcatcaacagagtaaacacacaacctacagaataaaagaaaatatttgcaaactatgcttttgacaaaggtctagtatctagaatccataaaaaactgaagtttacaagaaacaaacaacctccttaaaagtaaacaaaacgcagccaggcgcggtggctcatgcctgtaatcccagcactctgggaggctgaggcgggtggatcacctgaggtcaggagttcgagaccagcctggccaagagggtgaaacccagtctttactaaaaacacaattagctgggcgtggtggtaggcacctgtaatctcagcttctcgggaggctgaggtaggagaatctcttgaacccgggaggcagaggttgcagtgtgccgagactgtgccactgcactcgagcctaggcaacaagagtgaaactccacctcaaaaacaaaacaaaacataacaaaaacctagtagacaaaaggctaagagtaagattaaaggctcacgcctgtaatcccagcatcttgggaggccaaggagggaagatcacttgagatcaggagtttgagaccagcctggccaacatggttaaacctcatctctactaaaaataaaaaaattagctgggtgtggtggcaggcgcctataattccatccactcaggaggctgaggcaggagaatcacttgaacccaggaggcgaaggttgtagtgtgctgagattatgccactgcgctttagcttgggtgacagagtgaggcttcatctcaattaaaaaaaaaaaaaaaagtaaacaaaaaacatgagcaaactttttccaaaataagatatatatatatatatatatatatatatatatatatatatatatatatatatatatggctaacaagcctatgaaaaaaatactcatcactacagaaaagcaaagaaaaaccacaatgatataccatctcatatcagtcaaaatggctattactacaaagtcaaaaaataacagatgctggcagttgcagagaaaagcgtatgcgctgctgctaggagtgtaaattagttcaaccattgtgaaaagcagtgtggcgattcctcacagaactaaaagcagaattaccatttgacccggcaacctcataattgggtatatacccaaagaaataaaaattattctgtcataaagacacatgcacatgcatgttcactgaagcactattcacaatagcaaagacatggaatcaaccgaaatgcctatcaatggtaaactggataaagaaaatatggtacaggtaaggtttggtggctcatgcctgtagttccagcactctgggaggctgaggcaggtaaattgcctgagctcaggagttcaagaccaccctaaacaacatggcaaaaccctatgtcaacaaaaaatacaggaagaaaaattagctgggcttggtggcacacacctgtagtcccagctagttagggggctgaggtagaagaactgtttgagcccgggaatttgaggctgcaataagccaagatcatgtcactgtactccagcctgggtgacagagacccattttcaaaaaataaaataaagtatttagcaaaaacaaaacatggtatataaacatcatggaatactgcattgccataaaaagtgaacaagattatgtcatttgcagcaacatagatggagctggagaccattatccttagaaaactaatgcagaaagagaaaaccaaatgcatgctctcatttattagtaagagctaaataatgagaacacaaagaggggaacaacacacacccttctagttaagggtggaggacaaagaggatcagaaaaataatacctgtgtggtgctgtgcttaatacctcagtgacaaaataatctgcacaccaactcccgacacaatttcctctatgtaacaaacctacacatgtactcctgaatcaaaaataaaagttaaaacaaaaaaactctatgggtgaaagagagtgcaatgcaggtggaaggactggtttgtgctacagatagtggcccaggtacggctctactctgattaatttttgggttcatgctggcagatgatattatgaacaggttgtccagaacctcatgttggtggaaaaaacatgttgctgctgcagattcagtgtctggggttgggatatgccaggagacttgtagacacttgagtgagatttggcaggaaacactaggatcaaaaatgctgtagtgaaattcctgagggtggtaactagttctaagaggggtgtggataagccagtgtccagtggatatgcttgtaagaaggtgggaatcctgtgatggcagcagtggaaaaaggcggtctgttcgcatattctcactcataggtgggaattgaataatgagaacacttggacacagggtggggaacatcacacaccagggcctgtcgtggggtggggggaggggggagggatagcattaggagaaatacctaacgtaaatgatgagttaacgggtgcagcacaccaacatggcacatgtatacatatgtaacaaacctgcatgttgtgcacatgtatcctagaacttaaattaaaaaaaaaaagaaaaaggcggtctgttattagaacttttttcctcttttttatcctctctcaccctgggaggagacctgaaatcacagggtaatgggcagtgtgatggcctgtgtacagaaaagcagagcctcccattcctagacacccagagatccattccagaccaggcctctgtgatatctctcagctggaaccaaatttgtagagtttgctaaacaccaagcaattctcccacaccaactcactgtctgacattctccaacaccaactcactgaattctgacaccacccagagtcagcacacaccctgattcagggctcagtctcacaacattgttcttactgaaaaagccagtcacaaaccccatgggcccatctttgcttctgagctactgtttaaaaactggggactctcataacattcctcaaattcaataattttatagagctagtcacagaactcaggaaaacactgtagttacatttatcagtttattagaaaagatacaatccaggaaaagtcaaatggaagaaatgtataggacaaagaaaagatgtggggaggctgagcacggtggctcacacctgtaatcccagcactttgggaggccaaggtgggcgatcacctgaggttgtgagttcaagactggcctgaacaacatgaagaaacctcgtctctactaaaaatacaaaaaaattagctgggcgtggtggtgcctgcctgtaatcccagctactcaggaggctgaggcaggagaatcgctccaacccaggaagtggaggttgtggtgagccaagattgtgccattgcactcaagcctgggcaacaagagcaaaactctatctcaaaaaaaaaaaagaaagaaaagaggtggggaaagataaagcatatagataatcctggtaaatagctgtgattaataaaattctctatcctttgtgtgctccaggaacagtttctggaaagaaacacccttcccattatgacttcgatggtgctctcttttcttacctatcacatagccagacacagactctgcacattgtctcctttttctcattaaaaaataaataaataaatcgggccgggcgcggtagctcatgcgtgtaatcctagcactttgggaggctgaggcaggcggatcaaaaggtcaggagttcgagaccagcttggccaatatggtgaaacacggtctctactaaaaacacaaaaattagccaggcatgatggcagatgcctgtagtcccagctcctcaggaggctaaggcaggagaatagcttgaacccgggaggcggaggttgcagttgagtcaagatcgtgccactgcactccagcctcagcaacagagtgagactctgtctcaaaaaataataataataaaaataaataaataaatcagctgagtttgttttcagtggtcaacctaaaatatttcttaatcaaacattacttatttaaacaggcttctgaactttgagctaccctcagtctgagtcaacatacaaccttatttttatgtagttcctaagtacatgatgacttcagtgtaaaacattctctgatctaaaatctctttctttcaccctccattcgccatcccctccgacctcctctctaatatggtttgctcttccatatgaaacaaggcccttgtctgcctaaacttagcaatccttaaagatcttatagttggtatttcctcctgttgcaatacccttttggaattcaattcttttttcaacataaatctaacttcgttttattttacaaagtctagaaactatctcaaaacaataacaatttcatcttcagtaagaccctcccaatcccctttcatcttaaccttaactgcatctgcctgtgggtccccagctttccagggttctgtggcttccctcaggataaagtctccttccatgactggggtgagcaggctgggatatctgcagagaagactccccagaaaaaactaactgatcctttaataacctccttttgcaggctcagtattagccttagcttagagtcactgggctcaggctttaatcttcatgtcagagttattcccttggtttttgaaagtaagtgttcgaaaaattcagtgcaattactctaacacagtgttcatataagggaaggaaattttaaggtgcttacactttatatctcaataagagaaacaaaagtatctattcttttcagacaataaatgtattattttactatttccattaaaaatcatgtagtaggccaggcgtggtggctcatgcctgtaatcccagcactttgggaggctgaggcgggcggatcacctgaggttgggagttcgagaccagcatggccaacatggagaaacccccgtctctactaaaaatacaaaattagcggcgtggtggcacatatctgtaatcccagctactcgggaggctgaggcaggagaatcacttgaacccgggaggcagaggttacagtcagccaagatcgtgccattgcactccagcctgggcaacaagaatgaaactctgtttcaaaaaaaaaaaaaaaaatcatgtagcaaacaattagtcatatggaaacatttctagaaggtacaaagtttcagcatgaaactcagatagcaaagtaataggatacagaatagagatagtcactgttacaaatttaccctgcaaaaggaggaactgatgttttcatgaatctaaggaactcaccaattaccaccttttcttgtggaaatatgtgcattttctaaagccaaaatggaagagagattttccctatttttcttccttggtagcatttgaaaagtcaagccttgaaattctgtttaaaatcacccaaccataaaaaacacaccagagaaaattcctaaagtcattctgggaaaaaggtaaatgaaaatttttaacaaatggaatatacaattcaatattaattttattctgaaacccatctcttttttgcccttggttaagtattttcttacctttcaatccctactaacaaaatgcaatttacagttaaaaaactgaggtcaaaataagtgaacaaatcttttcaaggtacagatgtgtctgattcatgtgtcaagtcaggccatccaatcacttaagagattctcccaccccattctcctcacttaagtgcccaataactccttctcaggagactctgaactatgccccagtgagtgccccaggtaagaacttttcaagttcttacaccatctcattggggtcactttttttttttttttttttttttgtcgtttgggacactatttttgatttcacagattctcactatttttctttcactattttttcattatatttcactattgttctgctcccttaaagaatgcagggggcagaaattatttctgtgttttccccgcaataccagcatctgattggctgaccagcaatgtgtcttcaaaaaatggaagctgggttgggtgaagacaatcttaatgtctcaagggttagcttttcaaaggaagagtataccaggagagacctctcaaccccagggcatctgccttcttcgttgaaaggctacactccacacctcaggttgtcctactggagaaaatgaccaggagctgatattcactagacactctagcagacatagccatggggaatattttagctaattcccagacagtactgaaacccaggaccagggaaaaaactgaagaatggctgaaaacacatcataaagtttccaaaggaaaacctttacctttaccccaaaacattctgctaaaatctgtggagcaaggaggaaaaaaaaaaagcggcacaaagattttttacaacacagtgtcaggggattattttttgctttcttctcttaggaaatattcacaaacagaaaacaaatattatgaaaagtaccatccaatgctttgttaaaaaataaaatacagtatcaaaatgtacactaaggacaaatagtaatgtgaatcagagagggaaaattgacattatgaactggaagtttagtattttattgcaagccagagttaggctgcaggaattggggtttgggagtagacataatactctgcttgagatacctgtaaaaaatggaggggaaaatcagtcatctgaggagtgtgaaaataattaaaaataattaagtggcaggcaaatagactgaggtggctctagtgcctgatatctacttttttttttctttttttttaagacagtttcggtcttgttgcccagaatggactgcaatggcgcgatctcggctcaccgcaacctctatctcccgggttcaagcaattctcctgcctcagccccacgagtagctaggattacaggtacaggcatgtgccaccacacctggctaatttttgtatttttagtagagatggggtttctccatgttggtcaggctggtcttgaactcccgacctcaggtgatccgcctgcctcggcttcccaaagtgctgggattacaggcatgaaccaccgcacctggcctttttttttttttttttttttttaatatgagagggagtctccctctcttgcccaggctggtgtgcagtggcgcaatctcagctcacagcaacctctgcctcccgggttcaagcgattatctgcctcagcctcccgagaaactgggattacaggcatctgccacactcccggctaatttttgtatttttattagagacggagttttaccatgttagccaggctggtctagaactcctgacttcgtgattcacccgcctcggcctcccaaagtgctgggattacaggtgtaagccaccgagccaggcctgataatctactttttaaaaaatctaattcggccggacgcggtggctcatgtctgtgatcccagcactctgggaggcggaggagggcagatcacctgacgtcgggagttcgagaccagcctgaccaaaacggagaaacctcgtctctactaaaaacacaaaaattagccgggtgtggtggcggatgcctgtaatcccagctactcgggaggctgaggcaggagaatcgcttgaacctgggaggcggaagttgcgttgagccgagatcgcgccactgcactccagcctgggcaacaagaacaaaactccgtttcaaaaaaagaaagaaaaaaatattaataattcaagtgcttttttttttgtaaattactacattgggggaaacaaaattcaggcttaaccaactataaactacaattaacctctgattatataaacgggaaatttccatcttgattgtacaaattaagaatctacgtaactgtacataacccattactgaatttggttttcttcattatgcaccttataaaactctttccgtcaaatcccttccatagaccataaactacaaaccacagctgggtgctctgccatttttgaatcactctttgattaaatcctttattactttagtgatgactgccatcaatttttaataggagaaaagagggactggaaacctcactggaccaaagctcttcccattcatgaacccgcacccggagtcaggattctcccctgacgcccctcccgtggtccctgcacaatctgtgagagaggaggcgctgcgggtgaagagcggcccagagagggctccaggccagggcatagtcacagtgcaggaaggaggcaggtcgcccggggtcccgcagtcagcgcagccgccatcttatggctgaaggagactgaggccgagctgggcaagagctcggggcgcagactgtggagctcactgaggggaggcctgagtcccgccacagccactttccaccggttccagtcagccccttccccttctcaggatatcggacccggcactctcaccatttctaagcttccagggggtcctggcgtcctagctgtggatctccaaatacctacaggtcacagggccacagaggctaaggacacagagcagtaaaaacgagatccggagctccagctggaaccagaaacaacggccccgccacatcccacaagccgccctttccgctccagctgagtgcctgattggacggttcccagcccagagtccctgattggataatgtttaaatccccgcctcctcaggccctgagtgacagaagatgtgatctgatgctgagctgaatgaagagtgacgggccgggcgcggtggctcacgcgtgtaatcccagcactttgggtggccgaggcgggtgaatcaccagaggtcaggagttggagaccagcctggccaacatggcaaaacccggtctctactaaaaataaaaattaggctggtgtggtggcgggcgcctgtaatcccagctactccggaggctgaggcacgagaattgcttaaactcaggaggcggaggttgcagtgagccgagatcgcgccagtgcactccagcctggatgacagagcgagattctgtcacgaaaaaaagaaaagaaaagaaaaagaaaggaaaggatgacagtctaggctgcagccttttcaggcagggcttccttcctgaactgagccaggccaaccccagagggtatttgcatttaaccttttgtataaggtcacattcttttataaataatatattatatggttattcacaaatgaaaagaatataacaattatctaaaattttcagagtttatgaccttcctggcttctggttttttcatcagattgcctgaggttttaaaaagaaggcaatcctctgaaataaaattgtattttaaattttctagtagccaaactttaaaaattaaaaaaaaaaaaaacaggtggaatttattgtagcaatttaattaacccaatatatccaaaatatcatcttaatacgtaagcaaaatgtaaattataaatgaagtgtagatattttttggaacttcatctttgaaactaactctgtattttacctttccagcacatcacagttcagaccagccacattccaggcactcagtcgccacacatggccagtagctgccacattgaagtgcagctctgaccttaggagagggaagggcctgaacaaaccttttctgccaaagatggaaaaagagcctttccctaccaacatctctcttcagctctgagggaggaacagatagtagccataaataaagcacaggacagcaggaaaaaacaaccacaggtagaccactgctggccacctgttgcctacctttattccagagatcagaaggtgaactaaggatggtaaggccacaggagaagaaatctctgtgtcttcaaatctgtgcacagtcttgacctccaatgtttagatatgaagaaaatagattaaaggaaaacttacttttctatttgtccttggccctaatggtcaggctgtggttatctgttttctcctgtggtatgggggactgtgtgagtataggcaccaattacatgcatacatgtccacatatatttctgcattactcagcattctcttacgaggcctccaactttatatcaggggaaaaatcagtacctatagggtacccactgttagaagagaactagtaatcaacttgtcaatgaatcctggcatcctatctgcactgggtgcatgtattaattagctattgcagcacaacaaatcattcaaaacttatttgctcataattgagatggtcagctatttagggtgggctcagtgaggctgttctttttgtctcagctgagctcctccagacatgtatcttcagctgtttgttgaataggcagctgtgcttctggggatgagcttctgcttctggggctgtcaacaggggcaacttgcttctcctccccatggtatcttatcctccagctggctaacatgggctttattcatggagatggcagcattctgaaagaaaaacagaagcattcaagaccttttgagcctacgccccaaactagtacattgtcatgttcacaggtttctactgccctgagtgaataaggccagcaaaatctagggtttgaaaagcattctggatcttgatgggaacagctttaaaagcacctacaatgggcatggatacaggaaaaactagaaattgctaccatttttgaaatcagtatcattctgcctttgtttatttgtttgtttgttttgcatatgtggtttatagaactctttcacatcaagaatcttgtccaaagacacacagctactaagtggctgggctgagactcaggatcaactctgtctgactccaaagcccacacacctccatagatgacactactaaagtagctgccctagacccttgaagtgtcctggagggtgacacttccacagtagaagccagattccttttattttttttttattaatctatttcacttcttttgagacagggtctcgctctgtcacccaggctggaatgcagtagtgcaatctcggctcactgtaacatcctcctcccaagttcaagtaattctcctgtcacagcctttcaagtagctgggatttcaggtgcttgccaccacacctgactaatttttgtatttgtagtagagacggggtttcagcatgttggccaggctggtttcaagctcctgaccttaagtaatctgcctgccttggtctcccaaggttctgagattactaacatgagccactgtgcccagcctacattccttttacatttgtgccaatatagtactgtttatcattgggaataatcctctcaagaatttgcagaagtgcacagtggctcacacctgtaaacctagcattttgggaggctaatgtggaagaattacatgagctcaggagttcaagtgcaggctgggtaacatagtaagaacctgtcttcacaaaaaaaaatttaaaaattagccggacatggtggtacatgcctgtagccccagctactcaggtggcagaggcagaaggatcgcttcagcctggagggtcaagctgcagtgagccatgtttggatacaccactgcactccagcctgggtgatagagtaagatgttgtctcaaaaaaaaaaaaaaaaaaaaaagaatttgccaaagcattttaaaaagacatagaatactggccgggcatggtggctcaagcctgtaatccctgcactttgggaggccgaggtgggtggatcacctgaggtcaggaattcaagaccaacctggccaacatgatgaaaccctgtctctactaaaaacaaaaaaattagccaggcgtggtggcgggtgcctgtaatccagctcctcaggaggctgaggcagaagaatcacttgaacccaggaggcagaggttgcagtgagccgagattgcgccattgcactccagcctgggcaacaagagcgaaactgcatctcaaaaaataaaaaaaaaagacatagaatactttgtgtttgtagctgatggataagtttagaaaatcgaaacccaacaacagattatttttcatcacagaaaaaatttgaaaacttttaaaagaaaaatactttagagaaattaaatttaaaagagtttaaatgggcaaagaatgatttgcaaattgggcagcctgtggagccagagtaggctcagagagactgcagcatagccacatggtggaaaaagatttatggacagaaaaagcaaagtgacatacagaaaatgggggtgagatacagaaacagccagattgattacagcttgagatttgccttactcaaacatggtttaaacagctgatgttgttttattgccaaaaacacagtagttggtagaagagtgggttacagtctattcacatatccagttaggtttcagtttactatgtacagaaaacctattgacaaaaattaaacagaaaagacggcagctttaggctataactgatttaacaatttctcccttttggtcatcttctcaattttgagagataaaccaaaactttagacattgatagcactctgtcaccatcaaaagtgtacttatttagtctcaaatcccactgtgaaatagcagaactgtgggttttgtaaagcgaaaacaaggacttcaggttattattattactattattattgttgttattttttttgagacagagttttgctcttgttgctcaggctagagtgcaatggcatgatcttggctcaccgcaacctctgcctcccaggttcaagcgattctcctgcctcagcctcctgagtagctgagattacaggcatgcaccaccacggccggctaattttgtattttcagtagagaccaggtttctctatgatggtcaggctagtcttgaactcccaacctcaggtgatccgcccgccttggcctcccaaagtgctaggattataggtgtgagccaccgtgcttggccctattttttttaaaaaaggaattacagtagagggaaactccttgtgttaaaatctgctgtttacagaagaaagcaaagcctggactgctttaggatctacttatttccttacatttttagtgtgattatgtcatatttagcatgagtgactccatacaataatggattttttaaaaattctcagataatttcctcatgcttttttccagataattttattcttcatcacaggccattttttggttgtttttctttttctttttttaattttttaaattttttttttaaccattggttcattttgcctgacatcatacaatacgtattattttatttcaagcttgtcttatctggcagatttatgagatacatccagagtgtgtgatttagtagttcatttttttctatggctggatggtattctcttgtatgaatgagatacaatttgttcatctatttttatagagatggatatttagtttgttccttgctgtaagctatatgaccaaaaacgcctataaacattcttgtacaaatactttttggtatataactaaattcctttattagcatttaagtgacacctctttacatttcttagtggtttctccagggatcactatatgcatctgtaacatatcacgatctacctagagtttatactgtactattttaataaatgtaaaatatgaaaaccttgctgttgaagagtttcaattacctctttttattcatatattttacatctacacatcattatatctcacaataccgtgttataacttttccttaaatagtcataagtcttatagagaaattgacagtaaatagtgtttataaatatttggaggcaggtactttggggctatgtaaatacactatttatcctttaaatcttacccacaatttttgcattttaaagtacaccttgtctacagtaattattactgtggtgtcttagtggtgattttctattttgcattatgtgtctacattgattagtacttggaattttgtaaaaaacattttttctctttctttttttatttatttatttttctatctgtagggattcatgaattttttttattctctaggttttaatccaatgctattaatgtatattgtgtttttcacattttttcaccttggactcctgagaagtctttcaggttgattttctctgacatggctgcttctgttgttttttttttttttttttttttgagatggagtctcgctctgtcgcccaggctggagtgcagtggaatgatctcggctcactgcaagctccgccttccgggttcacgccattctcctgcctcagcctcccgagtagctgggactacaggcgcccgccactgcgcccagctaattttttgtatttttagtagagacggggtttcaccgtggtctcgatctcctgacctcgtgatccgcccgcctctgcctcccaaagtgctgggattacaggcgtgagccaccgcacccggcctgcttctgttgtttataaaccacttttaaactttctgacttcacaatactctaccttaatttggattttccactccagtgctagaattgtctattattacaagtagtcttgctttttttttaattgaagaatagtacttagaaaccgtgatatagagctaggtgtgcccattaatactggggtgtcactgcttctgcaacctctcagcaaacagagtttggaaaggtacatattaatattgactcctgtatgaacacatctctctctttctctctctctcaatggatatgttatgacacatgcatttatccaaatattctcaactcgtctagaattatctttttttttcaacttcagttagaagcaggcactaattatgttacatatatatactaacatatagagtgcttttaaagattgctaatctaggccaggtgcagtggctcacgcctgtaatcccagcactttgggaggctgaggcaggaggatctcgaggtcaggagatcgagaccatcctggccaacatggtgaaaccctgtctctactaaaagtgcaaaaattagcttggcgtggtggcatgtgtctgtaatcccagctacttgggggctgaggcaggagaatcgcttgaaccagggagtcagaggttgcagtgagctgagatagcaccactgcactccagcctggtaacagagtgacactccatctaaaaaataaataaataaataaataaataaataaatgctaatctatacgcttatagacaagcaatacctaccagaacacaatgtttgtgttcagttcttgagtcttgcagtatttaatcaaaatactgttattcaaagtgatttacaccaagtccttttattccaacgtttttcaatagggttaggtgatacatttctagtaaggttaagctcttctttttactacctgcattttacctgaattttccccaaatccttgttttttataatttgcagagaggaaaaatttattctttgtgatgtacagttccataagttttgaaaactgtctagagtcacatagccatcttcacagtaccacacagaactgcttcattgcccccaaaattatctgatgcttcctatttatagttaactctaccctcatctattctttggcaatcagtgattattttctttttatttttcttttgtagggaggtctttctatgttgcccaggctggtctcaaaatcctgggctcaaacaatcctctcagctcagcctcccaaagtgctgagattatatgcttgagccatcaagcgtggcctgattattatcaatccctacaactttatttttctacaatgccatataattggattatataatttgtaccctatcggatcttactttcttcacttaaagaaatgcatttgtgactcatctatactgtgatgtcgatcaatggtttttgtttgtttgtttgtttattgacaactaggattctattgtatggatgccccagtttgtttattcattcacctgttgagaagcatctggtttacatctagctttttgcaattacaaataaagtgagcaatagacatctacaaaaaggtttcatttctacattagttttcagtttgctttagtaataacctagcagtgggatgtcgtggtaacataataagtgtatgttcaactttgtaataagccactaaagtgttttccaaagttatatcatttcatatttctagttctagttaacccaaattttcatccacactctttgaaatttttctttttacgattgccattatcatatttgtgtgtgatctcattgttattcatgcttcatttttttccatttctgttgggaaacccgaattatataatcagtgcagaaagaaatgtataaaatgcttaggcattagccttggattctggaaactgacttccagaaatctgctatgcaattagagctttacaaacattaaaaaaaatagtttattatctgtggttttctttttcttttcttttcttttcttttcttctctttctttttctgagacaaagtcttgctctgctgcccaggctggagtgcagtggtgcagtctcagctcactgcaacatccccctttacagttcaagcgattctcatgcctcagcctaccgagaacctgagattacaggcaaatgccaccatgcccagctaatttttgtatttttagcagaaacagggtttttcgtgttggcaagccttgtctcaaactcctaacctcaagtgatctgcctgacttgaatttcattctctttctttcttttgagacagattctgtctcacccaggcaggcatgcagtggcatgactgcagctgactgcagcctcaaccatctgggcccaagcagtttttctcacctcagccttctgagtagctgggaccacactcatgtgccaccatgctcagctaatttattattattatttttagaggtgaggtcacactatataacccaggctggtctcaaactcctgagctaaaagaatcctcccacctcagcctcccaaagtgctggaattacaggcaggagtcaacatatccacattgaggttttattttttatatcaaaatatgaaaaatagcattgatgtccattaatagaattcaagaaaatgttatgcatattaaaaaagtaatttcgccgggcgcagtggctcacgcctgtaatcccaacactttgggaggctgaggtgggcacatcacgaggtcaagagatcaagaccttcctggccaacatggcaaaaccctgtctctactgaaaatgcaaaaagtagctgggcgtggtggcttgcgcctgtagtcccatctactcgggaggctgaggcaggagaatcacttgaacccgggaggcagaggttgcagtgagccgagatcccaccactgcactctaacctgaagacagaacaagactgtctcaaaagaaaaaaataataataatttcaaaagcaaatactaaaattcaaaacaaattgaaataaaaataactaaatattatatagatatatgaccagaaagagagacgtttagttttcttgactttatttatttaatttcttttatttatttatttatttatttatttatttatttatttttgagatggagtttcactcttgttgcccaggctggagtgcaatggcgcgatcttggctcactgcaacctccacctcctgggttcaagtgatactcctgcctcagcctccccagtagctgggataacaggcatgtgccaccatgcccagctaattttgtatttttagtagaggcggggtttttccatgttggtcaggctggtctcgaactcccgacctcagatgatctgcccacctcggcctcccaaagtgctgggattacaggtgtgagccaccacgcccagcctgactttatttatttatttacattttattttgctttaagttccgagatacatgtgcagaacctgcagtttgttacataggtaaatatgtaccatggtggtttgctgcacctatttaccaatcacctcagtattaagccccacattaattagctatttgtcctgatgctgtccctccccttgcccctctgacaggcccgggtgagcgttgctcctctttctgtgtccatgtgttctcattgttcagctctcacatctgagtcagtaatgcaatgtttggttttcttttcctgtgttagtttgctgaggatgatggcttccagcttcatccatcttcctgcaaaggacatgatctcattcttttcttatggctgcatagtactccatggtgtacatgtactaaattttctttatccagcctatcattgatgggcatttgggttggttccatgtctttgctattgtgaatagtgctgtaataaacataagtgtgcatgtatctttgtaacagaatgatttacattcctttgagtatatacccagtaataggatttctgggtcaaatgacatttctggttctagatccttgaggaattgccacactgtcttccacaatggtttaactaatttacactcccaccaacagtgtaaaagcattcctacttctccacagcctcaccagcatctgttgtttcttcactttttaataatcaccattctgactgacatgagatggtatctcactgtagttttgattcgcatttctcttatgatcgtaatgttgagctttttttcatatgtttgttggctgaatgaatgtcttctttagagaagtgtctattcatgtcttttgcccactttttgacagggttgtttttttcttgtaaatttgtttaagtttcctgtaaattctggatattagaccgttgtcaaatgggtagattgcaaaaattttctcccattctgtagattgcctgttcgctctgatgatagtttctttttctgtgcagaagcttttttgtttaactagatctctttgtaaatttttgcttttgttgcaatcgctttcagccatttcattataaaatcttcacccatgtttatctcttcaatggtattgcctagattttcttctagagtttttatggtttggggttttacatttaagcctttaattcatcttgagttaatttttgtataaggtataggagaggggtccagtttcagtttgctgcacatggctagccagtttttccagcatcatttattaagtagggaatattttccccattgcttgtttctgtcaggtttctcaaatatcagatggttgtagatgtgtgttcttatttctgaggtctctattctgtttcattggtcaatgtgtcagtaccatgctgttttggttactgtagccttgtatagtttgaggtcaagtagcatgatgccttcagctttgttattttcacttagaattttcttggctacgcaggctcttttttggttccatatgaattttaaagtagctttttctagttctgtgaagaatctcaaaggtagtttgatgggaataccattgaatgtataaattactttgggcagtatggccattttcatgatattgattcttcctatccatgaggatgaaatgtttttccatttgtttgtatcctctcttatttctttgagcagtggtgtgtagttcttttttttttcttcttcttgagatggagtttcgctcttgttgcccaggctagagagcagtggcgagatctcagctcaccacaacctccgcctcccgggttcaagcgattttcctgcctcagtctctcgagtagctgggattacaggcctgcaccaccacgcccggctagttttgtatttttagtagagacggggtttctccatgttggtcaggctggtcttgaactcctgacctcaggtgatctgcccacctgggcttcccaaagtgctgggattacaggcatgagccaccgtgaccagcctggtgtgtagttctttttgaggaggtccttcacatcccttgttagctgtattcctaggtattttattctcttgtagcaattgtgaatgaaaattcatgcatgatttcaaaatctgcttgtttattgttggtgtataaaaatacttgtaatttttgcacattgattttgtatccagagactttgctgaagttgcttatcagcttaaggagtttttgggctaagacaatgggattttctagatacagcatcatatcatctacagagactatttgacttcctctcttcctatttcaacaccctttatttctttctcttgcctgattttcctggccagaacttcaaatactatgttgaataggagtggtgagagagggcattttgtcttgtgctgattttccagaatgcttccaggttttgcctattcaatatgatattggctgtggatttttcataaatacatcttattattttgaggtatggtttttcaatacctagtttattgagagttattaacatgaaggggtattgaattttgttttttatttgtttgtttttttgagacagagtctcactctgttgcccaggctggagtgtagtggcacagtcttggctcactgcaacttctgcttttcgggttcaagggattctcctgcctcagcctccccagtagctgggattacaggcacccgccaccacgcctggctaatatttgtatttttagtagagatggggtttcaccatgttgatcacactggtctcaaactcctgacctcgttatccacctgcctcagcctcccaaagtgctgggattacaggcgtgagccaccatgcctggccaaggaatgttgaattctattgaagactttattattattattattattattattattattattattattatttgagagagagtctcgctctgtcacccaggctggagtgcagtggcataatctcggctcaccacaacctccacttcccgggttcaagcaattctcctgcctcagcctcctgagtagctgggattacaggcgtgcaccaccatgcccgggtaatttttgtgtttttagtaaagacgaggcttcaccatattggtcaggctggtctcaaactcctgacctcctgacctcctgattcgcccacctcagcctcccaaagtggtgggattacaggcgtgagtcaccagccggccgttattgaagaattttactgcacctattgagataatcatgtggtttttgtcattgtttctgtttatgtgatagattacatttattgatttgcatatgttaagtgagctttgcatcccagtgatgaaggtgacttgtttgtggtggataacttcttgatgtgctgctggattcggtttgccagtattttattgaggatattcacattaatgttcttcagagatattagcctgaagttttctttttttgttgtgtctctgccaggtttcggtgtcaggatgatgctggtctcataaaatgagtagggaggagtctcttcttttcaattatttggaatagtttcagaagaaatggtaccagtagtataggaattattaagaaattattttaggcagttagcaagggtaaaaaagttctcagtgaattttttctttaatagaaagcagcgaaaaaccatttcttttctaacataaagcagcctgaaaagtcaagctgcaagcataaataagcaagctggaagtttgcatagatgaatgtgggcagctgtactaaaagccaggaccacccagtatggcaattcccccttccttttctttgtccccatgtatgcagttgtcgtggagccggccaggtagaggccacatttgcataataaaagattgggatgggagggccagtttttttgcaggctgtgtaaatagtacacttgggcaaaccaatccttcgagccctatgtaagtcaatcaccccctcctcaagcctttctaaaaaatcaattgcatcctgttccaaacctggaaaaacttcttgggcgcccgctttctctgcataaggaagctgtctttctcctgctcttctttctttcatctgttaaacttcctgctcttaaaaccccctccaaggttgtgtgtccgtgtcattaatcttctcagcatgagataatcaaccccgggtatttaccctggacaacgatgctgcttcaccagctcctctttttacctctggtagaattcggctgttagtccatctggtcctgggctttttttgttgttgttttggttggtaggctatttactactaaattttggaacttgattggtctgttcaaggattcgacttcttcctggtttaggcttgggagggtgtatgtgtccagaaattgatccatttcttctagattttttagtgtatttgcgtagaggtgtttataatattctctgttagtttgtacttttgtggggtcaccggtgatatcccatttatcattttttattgtgtctatttgattcttctctcttttcttttttattactctagctagtgatgttgtagcaggacaagcggcagacaaaagccctcagacaccaagttaaagaaggaagggctttattcagctgggagtttcagcaagactcacgtctccaacaactgagctccccaggtgagcaattcctgttccttttgagggcttacagctctaagggagtctgcctgagagggtcatgatcagttgagcaagcagggggtacatgactgggggctacatgcacaggtagtcagaacagaacagaacaggacagggattttcacaatgcttttccatacaatgtctggaaactatggctaacataactggttaggtcaggggtcgatctttaaccaggcccagggcacggcgctgggctgtctgcctgtggatttcatttctgccttttagtttttacttcttctttctttggaggcagaaattgggcataagacaatatgaggggtggtcacctcctttagtgtatgtattttattaatttcttaaaaaaaaaaaaaacagattctgggccaggcacggtggctcatgcctgtgatcccagcacttttggaggccaaggtgggtggatcacgaggtcaggagtttgagaccagcctgaccaacatggtgataccccatctctactaaaaatataaaaattagggctgggcgcagtggctcacgcctgtaatcccagcactttgggaagctgaggcatgcagatcacctaaggtcaggagttcgagaccagcctgaccaacatggagaaacctcatctctactaaaaactcaaaataagccaggagtggtggcacatgcctgtaatcccagctactcgggaggctgaatgaggagaatcgcttgaacctgggaagtggaggttgcagtgagccaagatcacaccactgcactccagcctgggcaacaagaacaaaatccatctcagaaaaaaaaaaaaaggccaagcatggtggcgcactcctgtaattccagctactcaggaggctgaggcaggagaattgattaaacctgggaggcagaggttgcagtgagccgagatcttgccattgcactccagcctgggcaacaagagtgagactccatcccaaaacaaaaacaaaaacaaaacaaacaaacaaaaaaaccagctcctgaatttattgattttttgaagaatttttcgtgtctctatctccttcagttttgctctgatcttaattatttcttgtcttctgtcagcttttaaatttgtttgctcttgcatctctagctcttttagttgtaatgttagggtgttgatttgagatctttctagcttttcaatgtaagcatttagtgctatatatttaccccttaacactgctgtagctgcatcccagagattctagtacattgtctttttgttctcattgacttcaaagaacttcttgatttctgccttaatttcatcatttacccagaagtcattcagaagcaggttgtccaatttccatgtagttgtgtggttttgagtgagtttcttaatcttgagttttaatttgattgtactgtggtctgagagacagtatgatataattgtagttctttcgcatttgctgaagagtgttttacttccaattatatgatcaattttagagtaagttccatgtggcactgagaagaatgtatattctgttgttttggggtggagagttctgtaaatatctatcagtttcacttggtccggagctgagttcccgtactgaatatattttttgttgttgtttttttttgttttgagatggagccttgctctgtcacccaggctggagtgcagtggtgcaatcttggctcactgcaacctccacttccaggattcaagcaattctcctgcctgagccttctgagtagctgggattacaggtgcacgccactatgcctggctaatttttgtatttttagtagagacggggtttcaccatgttggtcaggctggtcttgaactcctgacctcgtgatccacctgccttggcctctcaaagtgctgggattacaggtgtgagccaccacgcccgtcccctgaatatctttattaattttctttctcattgatcggtctaatattgatagtggtgtggtaatgtctcccagtattattgtgtggaagtctaagtttttttgtaggtctccaagaaattgttttatgaatctgggtactccagtattgagtgcatatatatttaggatagttaggacttcttgttgaattgattcctttaccattatgtaatgcccttctttgctttttttgatctttgttggtttaaagcctgttttgtaggaaactaggattgcaatcactgctttttttctgctttccatttgcttggtaaatttttcttcatcttttttattttgagcataagtgtgtctttgcatgtgaaacgagtctaggccttgtggtgatgaattctctcagcatttgcttgtctgaaaaggatttcattactcctttgcgtatgaggcttagtttggctggataaaaattctgggttgaaaattattttattccagaatgttgaatattggcccccactttcttctgcttgtagcgtttctgctgagagatctgcttttagtctgatgggcttccctttgtaaatgacctgacctttctctctggctgcccttaacatttctttcttcatttcaaccttggagaatctgacgattatgtgtcttggggttgatcttctcataaagtatcttactgaggttctctgtattttctgaatttgaatgttggcctgtcttgctaggttggggaatttctcctggatgacctcctgaagtgtgttttccaacttggtttcattctccctgtctctttcaggaactccaatcagtcataggtttggtttttttttttcttttgtagatggagtttcactcttgttgcccaggctggagtgcaatagcgcaatctcagctcactgcagcctctgcctcccgggttcaagtgattctcctgcctcagcctcccaagtagctgggactacaggcgtgtatcaccatacccagctattttttttttttggatttttagtagagacagggtttcaccatgttggtcaggctggtctcgaactcccaaccttaggtgatctacccgcctcggcctcccaaagtgctggtattacaggcatgagccactgcgcccagccggtttggtctttttacatagtcccacagttctcaaaggttttgttcattactttttattcttttttctctaatcttgtctgcctgccttatttcagcaagatagtctttaagctctgatattctttcttctgcttgattgctttggctactgatacctgtgtatgcttcacaaatttctcatgctgtgttttcagctccattaggttatttatgtttctctctaaactggttattgtagttagcaactcctgtaatcttttaccatggttcttagcttctttgcattgggttagaacatgcttctttacctccttgaagtttgttattacccaccttctgaagcctacttctgtcaattcatcaatctttttctctattcagatttgtgccctttctggagaggtgttgtgatcatttggagaagaggcactttggccttttgtgtgttcagcattttttggttgattctttctcatcttcatgagtttgtctggttttgatctttgaggctgctgacccttggatgaagtttttgtcaggactttttttgttgatgttgttgctgttaccttctgtttgtttttctttcaatagtcaggttcctcttctgtaaggctgctgtggcttgttgggggttcacttcaggcctatttatccaggtcactcctgcatctggagatgcccacagaggaggctggagaacagcaaagataggtgcctcctccttcctttgggatttctgatctcgagggacagtgacctaatgtctgtaggaacactcctgtataaagtatctggagattcctattgggggtctcacacagttgagagcatgggaaccaggaaccatttaaggaagaattttggctgtcccttggtggagggggtgtgccgtgctggagggaaacccatttgtctgggctgcctggattctgcagagctagcaagaggaaagactaagtttgctggtcattggaggctatggcaacttttccccctagggggtcagaaccaggaagatcagggttctgttcctgagctcctagctggatttgttggagcttctgcagggaggccccactcagtgagaagggatggatcagggtctggcctaaagaggcagtctggccattgtctgcaaattgggaccaagttgtctagcctccctgactccaacagggaagtagcatggcctggagctatagtgatggctgccaccctcccctacaccccaggggcttagtgcctttggtagttagcagctgcagggatagctgctgcccctccaccagggagttcagatggcttagactgcaggcagccacagtatgtagcccagtctggtctcaaactcctgggcttatataatcctcccaccttagcctcccaaaatgctggaattacaggcatgagccatcacatccacagtgaggttttattttttatatcaaaatataaaaaagagcattgacattcattaatagaatccaagagaatattatgcaaatttaaaaagtaatttcaaaagcaaatactaaaatcgaaagcaaattaaaataaataaaaaataactaaatattgtatagataatatgaccagaaagagaaacatttaattttcacgactttgaagtgaagtttaccaatgggatatttttagtggagaagattctatttccataagaaattcaaaatgagataatttccaggttttaaaaactgatgcaaaacatataaatatagaaagcctctaaggtatgtagtactacttgacatgaaaactgggcaaactcagcaaaaggaaatttttttttttgagatggagttttgctctcgtctcccaggctggagtgcagtggagtgatcttggctcactgcaacttccgcctcccgggttcaagcaattctcctgcctcagcctcccaagtagctaggattacaggtgcccgccaccacgcccagctaattttttgtatttttagtagagatgggatttcaccgtgttagccaggatggtctcaaactcctgacctcaggttatccgcctgcctcagcctcccaaagtgctgggattacaggcatgagtcaccacgcccggcagcaaaaagaaatttaaaattaatctcaagtgtcagaatagatacagaagttctaataatataatattaaatggaatccagagttttattaaaaaataatatgttgtatatttatgtattgtgttattaaactgtaaatgttattaaaaatagaaaatctttttttatttaattatgtaaaaggttaaaaagtgagcagggcatggtggctcacacctgtaatcccagcactttgggaggctgaggcaggcggatcacctgaggtcaagagttcaagatcagcttggccaacattgtgaaacccagtctctactaaaaatacaaaattagctgggcatggtggtgcatgcctgtaatcacagctcctcgggaggctgaggcaggagaatcacttgaacccgggaggcagaggttgcagtgagccgagatcatgccattgcactccagcgtgggtgacaagagcaagactgtctccaaaaaaaaaaaaaaaaaagtggctgggcaaggtggctcacgcctgtaatcccagcactttgggaggccaaagcgggcggatcttgaggtcaggagatcgagaccatcctggctaacacggcgaaacccagtctctactaaaaatacaaaaaattagcctggcatggcggcgtgtgcctgtagtcccagctgctggggaggctgaggcaggagaatggcgtgaacctgggaggcggagcttgcagtgagccgagattgcggcactgcactccagcctgggttgtggcactgcactccagcctgggtgacagagcgagactccatctcaaaaaaaaaaaaaaaaaaaaaagtggccattctcagtaattttgaaagcagcattgtctaaacagatgtgaatttgcatctacatttatctacacatagatttacatagtatctgtctatgtgttcttcatccatccatttatagaatgtataaaaaggatggatttaaaatagagtgatttaaaaaagcatttgaaatgtattatcacagttaattacattgtctagatatttatatgttcactcacaaaatataaaatgagattattttatcaacccttccagataatttttttcatttattttatttattatttttttttgagatggagtctcgctctgtcgcccaggctggagtgcagtggtgggatctcggctcactgcaagctccgcctcccaggttcatgccattctcgggcctcagcctcccaagtagctgggactacaggcgcccaccaccacgcccggctaccagataatttaataaaatattttaaaactatgtgactaatattattagctgaaaataggaaagaatatatttatttgcacaaataataaaaatgctaaactaaatgtaaaatataaaaatatccctgaaaaaggcaaataatgtacactatttaaaaaataactgtgctacaagagttatgcagcatacaggaatcatacataaatatcaactatttatatctattttttgagacaggatctcaatgtatcacccaggctggaattctgtggttgatggtgccatgagtaaccacaccttacctaactatagacattttaaataatttcagtgtgaaatactaaacataattcaaaatatattttccttatatgtaatgaggcaaacagtttcaagatctaaatgatgagtgaaaaagaattccaacaacctgcggcatgataatgcaaatagctcacgtgtacagcgctctcactgtgccagcccatgtttagaagcatattagatatttttgcgcattaaattatcatcagaaataactctttcaggtaagtttaattattccccatgtcgcagacaaggtgactgaatggaaaaatattcagggacttatccaaggtcacccagatagggagtgggtgagctaaggtgtgctctgacctcctctctgcttccctggcacagacagtcccattgttcattgattaaacagctctcattgagcacctgccatgggccgagcactgtgcctggtactgggaacatagtggtgaactagacacaactcccaggagcaaacactaaagaagtaaacaacaaacagcaagattattgcagagaatgacaagttgctaagacatgctgctgctgtaaaagatggacgtgcatagggctattgggggtgggttctagttggagggaggagggtggagcaaacctccccaaggaagagctgagcccagcctggaggctcctgtcagtgtgaggatgtggttagagtctgtctcagtttctttccatgcagcccctaaaatctttggaatgtctgaaatgagaagtgtcttttccatgtaggcactgatcctcacatacattagagaacagaactcttgctgtgcccacggccagggaaaggggaacaatatctctctaccttgtggatcctagagcaccttgtcctgccaggacgctcaccctcacccccacaaggtacagatggcaaccagggtgccgcataccacccactggctcgcccaaaggatgctgagtcctgtagggaccgtgggcctgaataatgtttcctagtcatagagtctttctgattttctcactcactagccctgtgcctcagtttccctcactgtggcacaaaatcaacatcccattccgcaggctaggtgacccagagaggtcaccacagcccattaaatgactatagcatgtgaaagtgggaagtgagagtccctccctgctctgggtcttttgccccaggacagatgtttatcaggccagctgcctggggagggccacacctcctgacttgggaacattgtttccaaattgaggtcactacagttaaggactcccaatgcattggggtaggcacaggggtgggatggggtaaagcaacatcgcattacaagagccttggatcgaccctggagagcgagaatcaaatttagactcctgtctgaagctgaccaccctgaataattaggatttggggatacgacaaggctcttggttcaggaaacaagatcttctggttctggactctgtagctgtcctggggacttgtttccaactatgtgctttaattgaacctaaggggatggggcactcggaaggaactcttaagccaagggtgagaggcctgccttctgcctcccaaactccctccccagtggtggacattgggcggcaaaatttctttacaaagaaaaaaaaaatatccagagaccaggaaggctaataaatgcttaccaggattatccagcctaatcatcacaacagtcctgccatattcgtcctctgggacaggtgaggaaactgaggttggaggaggacaccgggagcctggtcgggccactggaagcctggagccccagagttcccggcattcaccgccctccaaccccctctctccctcccggccccgggaagcttcattcccagctcattcacttgtcaatcactcagactcgctgggcctccagccctccctgaagccctcgcactcatcaggtgacggcctccctctgtgtggctgccaggctggggatgggggtgtctgtgcttcccttgcccaagccgagagtggcctgttcccagggggcaggcttcctccttggttggcagccaggagtctggagcgcaggtgccgggcaggcagcactgggagcgctcggcgacttagctggaggcctaaggagccacccctcacggaccagagcgcctttgcaaggtgggctcgccgcacactctgctcctcttctgtggccccggggcccctcctagaacaccctcctcatctcgggggaccttgaccgccagcagccccacacctgctacctctgcctggcgttgggtgcgcacctctagggacagatggatcccttagcccagcgggcttgacagcagggtgggggcagtgggggctccagagagtgtcaccgccttatgctggccaccgccgggcaggggctgggctcagctgacaccctacatccgccctccagattccagtgtctgacttcggcgaatctggaccggacgcgtggtctggggcctggactgtggacgcccatgggccgggctccccgcggggacctcgcacttgggtggggaccctgcggctccaggcgccacacacatcagtgcgcccgctctggctgtgaatttcggggaggggcggcagcagagcacgtgggctggctgggtggggacgatcacccgccagcgccttttcccacccgggcgccctttccagtccccgcgtcgcctgcagggccgcccctcctccgcccgctggttcctccccactcgccgctctccagccccgcgcggctctgtggcccgggctccaaggcgggggccgcccacgacggccaccggcagggacagcgggggcaaatttcccagagcggtaagccggccccagccagccccacggcagggatggcttcgaatccgagcccccgacaccccggccccgtccgcccagcccgcaccctgcgtggctcgctgcccgcccgtcccgcacccgctcggtcactcgggctggggccccctgcagggtgggcgcgacccagcgccgccgcacggagcctgaacccaaaccccaaacccggaccgcaggatccccgccctctaggaaccaggacgggccctcctagcgggtatttggggacctgggtgtgtatctgtggaaacaattggtcaaaagtggctttttgttttcccaaaggtaaaggctcctttgtaattatgtattttcttcttatttacttaaaactgatagaatctcatcatttagatgaatccataattgtgtcagtgaatttgagtacactttttaaagtttttctcagtttaattagtccttttttttgtttctagtttaagaagaattttaaattctacctaaaattagtaaagtgaactccaaaatatctgagataggtctcaatttagaaaatttattttgccaagattaagggcacacctgtgacacagcctcaggaggtggtgacaatgcgtgcccaaggtgattggggcacagcttgattttatgcttttttttttttttgagacggagtttcgcccttgttgcccaggctggagcgcagtggtgcaatctctgctcaccgcaacatttgcctcccgggttcaagcaattctcctgcctcagcctcctgggtagctgggactacaggcgcccgccaccacgcccagctaattttttgtatttttagtagagacagggtttcaccgtgttagccaggagggtctcgatctcctgacctcgtgatccgcctgcctcggcctcccaaagtgctgggattacaggcgtgagccaccgtgcccagccctgattttatacattttaggagacaggaaacatcaatcaatatatggaagatgtacatcgtccaagaaggtgggagaactcgaagcagggcaggagcttccaggtcataggtagataaaggactaatggttggttgcaatttttctgagattctgattagccttttacaggggtatttccaggtctgtctctcctaagcttgcccaagagaaacttgacaccaaggttgtataattttaatctgtttttgccaaatttttgtctatttcataacttacaataacaggtaatttaaccaaaacccttatggttttctagcacaattatattataagctacatatgtattcttagcaaggtaaaagcaatagaaatgatgatgataaaataacaacttttctgtgcatgaatagcccttcagctggtgacatcacacagcccactgttgaggttccgagtcctacacccacatgcaatcaaaagatggaaaatcgacttgcacacatggatctggtttacaggctggttgttgactctcacaccgtgattcagcaaacctgtaaggctgtgactttactaagaagacaaagtttgcaggaggaatagaggctttgatgcagtccactgctgagattgtgacttatgtacttagactcaacattcaggaggtgttgactcttatacctagaactgggacatgtgtgaaattattattattttccttttttttttgagatggagtcttgctctgtcaaccaggctggagtacagtggcgtgatcttggctcacttcaatcttcacctcctgggttcaagtgattctcctttctcagcctccacagtaactgggattacaggcatgcatcacaacgtccagctaatttttgtatttttagtggagacaaggtttcatcatgttggccaggctggtcttgaactcttgacctcaggtgatctgcctgcctcagcctcccaaagtgctgggattacgggtgtgagccactgcgcttggccatgtgtggaattattagtctcacccctggatcttattgcagatgttattgtgacatatgcctctcccagcacctgagtgatttgactctcttgtgaggtcttagctgacagattggattgtggcatatcacctaggtgatatgacactattcgcctgccttggcactacctacttggggctttgtgacatatgtctgtgctcataactaagatgatgtgattctcttctcttacctggtctctgctcacatgggagataatgacatattgctgggaccaataccaaagtgacattactcttttaccttgaccttcttctcagaaaacattgggacatattgttgggcccaccaccaacatgatgtgagtcttctgtgtggtctctgaccacagagatcatcgtgacatatctctgaaagttcaaaactatttgaagcgattatcttgttatgcctgctctttgcccataggagagaatgtaacatttctgtgggcccagcacctagttgatataagtgtgcctggcccatgcctacaaaagaaagactgacttatccatgggtccagcacacaggtgattccattctactgccttgattattgcccacaagaatcactgttacatatttttgggctctcctcctaggtgatgtgagactcttttccttccctggtcccatccacaaaggagattgtgacatatcacttgacccagcacctacgtgatctgtctctcatctgatgccttggcccttcccactgggctgatcatgacatatagctgggcacagctactaggttatgtgactcttctcttcctgagtcctgcccacagggagcattgtgacctatctctaaacacttcacctagataatgggactctttcatctgggccctccccaaagaggctattgtgacatgtttggatcaagcacctaggaaatattactgttctctcctacctgttacctgttactggtagtgaatccgtatgggtacaggtctgcagcaacctcaattcttgcctcctcagaagaaaaaaactcaactgaggggcataaggcagaaggagagaccaaggcaagtaatagagcaggagtgaaagtttattagaacaggaacaaaaggaaaaaatgtacacttggaagaggaccaagtggatgacttaaaaggcaagtgcacagtttgacctttggagctggggttttgtatgttggcatacttctggagtcttgaattacttctccccattcacccaactcctgagatcttattgggaagctgctgatcaccagtttcagctgttttctatctattaagagactgcctttcactagtgccagctgtgctgtaaccaattattactttagagggacagctaacaactgcctcacctgaccatcacctgatcattgactgactctcctggtgtgtgtgtggggccctcacttgccctgttcatacctgactagctacctactgtaacgctgcatgcattgtgtattgtgacatataacagggcccaatatctaggtgaggtgactctactgcaagggccctgcccaacaggggtattatgatatatttttacattcacgatttaggcgatttgcctttctctttctgccagacccctgccaaaatatggatggtgacatatcactgggcctaatgcctaggtaatgtgacttctgtcttttgaatgggccccacatattctgagtaccatgacatatcactgggccaaacatctagaagatgggaggtgccgacctgtgtactgtaaacagaactttagccctaccactctcaagagcctcgtgacatatctctgcatttgtcacctaggagatgtgactctcccctgctgccttcaccctgctcacagggaaggttgtgatataacattgacccagcaacaggatgatgtgtttccttttcctaggccttgctcacagggaccattgtgacatatcactgggcccagcacccaggtgctgtgactctgctgcctgtgccctgcctgtgtcctgctttcagaataggattgtaacatagacctggctgagtacccaggtgatgtgactcttctctctggttcctgccgtcagagaagattgcgatatatccctggcctagcatcaaaatgatgtgactctcctgtcactctctatccacaggtaggattgtgaagtatatcttcgttcaactcatcagtgagatagtaactttcatacctcaaaccaaccaataggagagacactatcttttgaagctaggctttgggaaatagataagatcccatttctcctctctgtatgaagatcacagtggatgtctgctgtcttatatatcacatcagcccctcatgtgttacagagggtgtcatcacagggcccagcacacaggtgacatggcatttcttattttttgagacggagtccctctctgtcccccaggctggagtgcagtggcacaatattggtgctcactacaacctccgcctcccggattcaagcagttctcttgtctcagccttcccaatagctgagactacaggtgcccgccaccacgcttggctaattttttgtatttttagtagagacggagtttcaccgtgttagccagaatggtctcgatccctgacctcgtgatccacctgcctcagcctcctaaagtgctgggattacaggtgtgagccacctcacccggccaacatgacatttcttgtgtgcacaccctgtcatccatcaggattgtcaccctcacgcatgaacagagcctactggtaaggtcttgaatttcacacgtgaatgcagtctacagttgaaattgtgattgtcatatgtgaacatccagctgcaattggcatggtgattttcaacctagctcctaggcaggtgaggactcttttatctggaaccagcccattatagagatgttgactctcacaactgagcttagttccacaggtacaatcatgggtccataccatcatgaaggtcatagagcagtttgtaactctcactaatactgcagaaagctctcgggtggtactgggtcttaaagaacctagcgcacaggtgagattgtgacactcatatgcaaacccagtcaacagtaaaaattgtcctcttttgacatgaacacagcccactgttgaggtcccaagtctccctcatgaaaacagtttaaaggtacgaaattgactcttatatgtagattcagttcacaggtgggttggtgatgctcagaccaatattcagcacacctgtgagtctgtgactccagtaagcatccacagtctgtaggagaaactgaggccctcgtaaacgaatcaagtgcaccattgagactgtgactcttgtacttagactcaacatatagaaggtgttttttttgtttgtttgtttgtttttgttttgttttgtttttgtgacagagtctcactttgtcacccaggctggagtacggtgtcatgatcttggctgactgcaacctccacctcctgggttcaagcgattctcttgcctcagcctcccaagtagctgggattacaggcacccgccaccatgcctggctaatttttgtatttttagtagagacggagtttcaccatgttggccagactggtggaggtgttgactctcaaatttagaaatgggacatgtgtaagattgttaatctaatctccaaattgtcttgcaggtgttattgtgacatatgtctctgcttagtacttgagtgatttgactctcctgcctgggcccagtccatagatgcaagtgtgacatatggcagaacccagcacttaggagttgtgactccatactcctgcctttgtgctgcccctagggttggaggggggaggattgcaacttatcactgggccttgcatccaagtaatgtaagtctttcttttcttggcaatgcctacaggggacactgatatattcctgggtcccaaacccagtttatgttattctcctatttgttccctgctcacatggcccatttctactaaaaatacaaaaattagtcaggcattgtggcgggtgtctgtaatcacagctgcttgggaggctgaggcaggagaattgcttgaatccaggaggtgggtgttgcagtgagccaagattgagccactgcactcccgcctggatgacagagtgagactccgtctcaaaaacaaacaaacaaacaaaaaaactgactatcatatgtgagcatctggtcaaatttggggtagcaaaacttttttgtttttttttttgagatggagtgttgctctgttgctcatgctggagtgcagtggcttgatcttggctcaccacaacctccagctcccaggttcaagcgattctcctacctcagccacccgagtagctgggactacaggcgtgtgccaccaagcccggctaatttttgtatttttagtagagatggggtttcactatgttggccagtctggtcttgtgatcttatgatcttatgatccgcccacctcggcctcccaaagtgctgggattataggtgtaagccaccacgcccggccagcaaaacatttttaaatgaagctcataggaagatgaaggctcttgtatctggattcagaaaattgaaaagatgttgactcatatctgggcttaattaccttagatgcactcataggtttataccagcatgaaagtctcagactcgattgtaactctcattcaaactgtataaagccctaggatagtacaaagagtgacgtaatagggccaagcacacaggtgagattatcacactcatgtgcacaccctgccaacagtaaagactgtcattctcccatatgaacatggcccactgttgagactttgaacctcacacacaaagacagctgaaagttggaaaattgaattacatatgtggttctggtccacagatgttttgttgactctcaaagcaagattcaggacacctgtgagcctctgactccactaggggaacacaattcacaggagagattgaggctttcaaatacagatccagaccacctttgagatggtgactcatgtaattagacacaacatacagcaggtattgactctcatacctagaaccaggacatgtgtgggattcttaatctcatccctagaccttcttgcacatgtgattgtgacatatgcctcttcccagcacctgagtgatttaacctttctgcctgggccctacagatggaattgtggcatatcactgaactcatacctaggtgacgtgagcctatacttttgccttagcacttttcacagacagcatagtgacatatcactggccctagaacccaggtgaagtgactttcctctattgcttggtctctgcccaagaacagattgtgatatgtcactgggcctatcacctaggtgatatgatttttctctcctacctggacccaacactttcataatgcaaatctcctgcttgggctcgcctacagaggtattataatatatctgttcatttatcacctaggggatgtgactctccttttctgcctgaaccctgctgaaagggagaattctgacatatcactgggcccagaatctaggttatgctacttttctgtttttcctgggccccacatattttaggtattgttacatattgctaggtgtcattcctttgggctgggatgctctggcttgcccacaaggggccttgtaaaatatttctgtatctgacacctaagatatgtgagtttcctcttttgcctgcatcctgtccacagaaaatgttgtgatatatcactggacccaggcaccaggtgatgtgtctgtcctgccaaggctgtgcccagagggagcattgtgacatatcactgagttcagcacccaggtgatatggctttgctgcctgtgctctgctttcaggaggggattgtactatatctgtggctgagtacctaggtgatatgactcccgcgtggtttctgccctcagggaagattttgacatacccttgccaaaaacctacttgatgtgactttcctggttgctccctagccacaggtagaattgtgacatatattttggccagctaccaggtgcattggttacctcatacctcaaaccagctaatagaagagacactacctccgatagctagacttaggaaaatgagtaagatcatgggtctcctctttgtgtaaaggccataaaggattactgttcttttacatatcatataaagcccttgaggggtacagaaaatgtcatcacagggcacaataaaagtgagattgtgtttcttgtatgtgaatcccatcaactgttaagactgtcaccctgacacaaggacagagcccattggagaggtcctgaatttcacacgttgacacagcccacagttcagattgtgactgtcatatgtgaacacccagctacaattgggatggtgatgtatttctaattctggcaggttaaatctcttctatctggacatatccaactggagagatgttgactctcattactgggcttggggccacaggaaggatcatgggtctatatgagcacaaatgtctcagagcatattgtgactttaatgtatattgtagaaagccctttggtggtacagagggtgtcctaacagagcacagcacgcaggtgagattgtgacactcatatatacaccaagctgacagtaaatattgtcattcttctggataaacacaggccactgtttaggttctggatctcacacccaaagtaagttgaaattgaaaaattgatgcataaatggattcagttcacagatgggttggtgactctcagaccaagatccagcatatctatgaggcattgacttcactaaagggacactgtctgcaggagggattaaggcttttatgaacagattcagtaaactgttgagattgtgggttataaacttagacccaacatacaggaggtggcgcctcttatacctaaaaccaagaagtgcaggattgttaatctcttctctggaccttcctgcagctgtgattgtgacgtatacctcagcctagcacttgagcagatttactgtcctgcctgggctcagcccacagattggatagtgacatcttgctgcatccagcatttagtcaatgcgaatctacactcttgtcttggttctgaccatagagagaattttgacatatcactgctccttgcacataggctatgtgactgtcctgcctgtgttttgcccacatgggccattgtaacatattgctgagtccagcacccaggtgatatgatcctccagcctttcctctgcctacacaagatagtgtgacatatctttgggtccctcacatgggtgatgtgactctcctgcctcacccttgtttcaagggatattgtgacataactgctgtaaccagcacctaggtgatgcggctattttccactgcttgggctgtgcccaatgaggaattgtgaagtgtctctctgcccagtacctaggtaatttgactctcctctttttcctgggcactgcatacattgcgtatttgaaaatatggctgaatccaacagctaggtgatgcaactatcttacaaaggccctgcctagagatgtattacgatgcattttttatttattacttaggtgatgtgactatcttcttctgccttggccctgcctaatttgagaattgtgaaatatcactggacccggcacctaagttatgtaattctcttctattgcctgggccctacatattttgggtattgtgacatatcactgcaccaaacaccaaagagataagaagctcctgcctaggctatgcctacagcagcccttgtgacatatttctgaattcattatgtatgagatgtgactctcctcttccgcttgcactctttctatagaaagattatgacatatcactgggcccagcaattaggtgaggtgtctgtcctgcttggaccttgcccactgggagcactgtgacatattgctgggcccagcactgaggtgatgtgactcctttctggaccctgcctttaggaagaattgtgacatatcgctagcccaaaaccaaagtgatgaaactttcttgcttactctataaccacaggtaggattgtgacatgtatctttgcccagctcataggtatgattatgattgatacgttgaattagccaatagaagaaatgctatctctcacagaaaggcttaagggaaatgaataaatccttaggtctcttctttatacaaaggttgtaggtgagtaccactgtctcacatgtcatataacgcctttgggtggcatacagtgtcatcacagggcccagcacacaggtgagattgtgtttttcatgtgcacactgtgccaaccattaggattgatactctcatgaataaacagagcacacttctgaggttctgaatctcacactcagatgcagttcaaagttggaactgtgacggtcatatgtaaatatccagccacagttgagatggttattcatttctaaacctagctaataggcaggggagaactcttctatgtaaacccagttacttggagagatgatgactctcatacctgggcttaatttcacaggtacagtcattggtccatagcagcataaaggtctcagagtggaatgccactcttaggtatatcatataaattcatcaggtggtacacagattgctctaacaaggcccagcacgcaggtgaaattgtgacacacatattcacacacagatgacactaaaaattgtcatccttccacatgaatacagccctcagttgaggttctaaacctcacacccagaagaactcacaaattgaataattgactctcatacatggatccagtccacaggtgtgttgatgactaagaccaagatagacacaccttagaggctgcaacttcaccaaggggacacagtttgcaggagggattgagtctcccatgcaagggtccagtctacaattgagattgtgactcatgtacttttatctgacatacaggagatgttgattctcatatctaaatccaggacatttgggagactgttagtcatatctatggactttcttgcaggtgtaattgtggcatatgtttctgcccagtacctgagtgattttactttcctgtatgacccaagcccacagatgtgattgttacataccagtggacccagcacctaggtgatgcaattatatttttctcccttggtgctgtttgcagtggggctttgtgatgtatcactgaacccagcacccaggttatgagactcttctgcctgtgccctgcccagatatgccattgtgctatattgctgcatccaacactatggtcatgtaacccacttgcctgggctctgcctacagagggaattgtgacatatctctgcacctattactcaggtgatgtgactcttctcctgcatagtccctgctcatcagagggattttgactaattcttaggcccagcacctagctgatatgattcttctttctaggtcctgcctgtaggggagatagtgacatatcactaggctcaacagcaaggtgatgtttttcttctgctttggccctgccctcaaaagtcattgtgatgtattgctgagtccagcaccaaggtgatgcccagttcttgcctgaatcctgcccacaggaggcaatgtgacttatctctgtgtccatcaacaatttgatgtaactttactcttttgcctgggcttttagcataggagagattgtgatatatctccatgacctaggttacatgactgtcctcttctgcctgggccatgcccacaaaagggagagtgacttttcactgggcccagcacataggtgatgtaattcttcctcctggtcactgctcacagggtttattatgacatatctttaggcccatcacctaggtgatatgactatagttttcttcctaggaccttttgacaggactgtgatatgtcacttggcccagcacctatgtgatgtgactgctctcataactgacccctgccatctagggtgattttgacatacagctgatcccagtttttaaattatggcactcttttttactttgtgagtcctgaccacagaaagcattgcaacatatctcttggcctctgacgtacaatatgtaactatcctgcctaaaacctattttcagggggtgttgtaacatattgctgaacccaccatctaggtgatgtgactgtcccatactggatgggctctgagcaaaatgggactgtgatgtatcactagggtcagcacctaagtgaagtgattctcctctttttcccaggccctgcatacattgtgtattgtgacatatgtgtgggtcaaacacctaggtgatttgactcttctgcctggagctttcatacagcatactatgacatgtcttttcatttattacctgtgttatgtgactctccttttctgcctgggccatgccaaaaggggggattgtaacatatcactggaccaagcacccaggtgatgtgactctcctattttatccagcccccacatatttttagtattctgatacatggctgggcccaacacctaggggttggaaatctcctttctctgccatgctcacagtggacctcatgacatatctctgcacgtgtcacttaaaagatgtgacccttttctgcctgcacgctgcccataggaaaaattgtgaaatactcatgggcccccaaaccaggtggtgtgtctctcctgcctaggccttgttcacagggagaattgtgacatatcactggactcagcacccaagtgatttgactctgctgcctgtgccctgctttcattagaggatattcacatatccctggcagaaaaccagatgatgtgactcttcttccgggtcccttctctcagagaatattataatatattcctgactcaagacccaggtaatgtgactctcctgcttccttcctatccacaggtgggattgtgacatatgtctttgttcagatcatagatgcaataatgactctaatacctcaaaccatccaataagagatatactgtctcttctagctaggtttagagaaacaggtaagatcctgggtctcctgtttgcataaaaataatatcaaattaccactctcttgcttatggtataaagcagtttgatgggacagaaagtgtcatcatatggtccagcacggcacacacgtgatacggtgtttctcatatgcacaccctgtgaaccattagaactgtcacccttacatatgaacagagcccacttttgagaacacaggtaaaactgtgactctcctatgcacactcagccaacagtaaacattgtcaccctcctaaatggaaaccatccactgttgaggctgtgaatctcccacgtggaggtagtcaaaagttggaattgtgactctcatacatggatcttgtccataggtagaatggtaactcaatgaacaggattcagcacagctgtgaggctgtgattcagatattgagactcagtttgcatttgaaattgtgtcttcacgcaggaatacagtccaccattaagacggtgactcatgtacttggaccaaacataaagaaggtcttgactttcatacctggagccagaaaatgtatggaattttgaatctcatttctggacctgcttgcaggcgtgattgtgacatataccttggtccagcacctgagtgatttgactatcctgcctgggtaaagcctcaaaatggaattgtgacacatgcctggtgcaagcatctaaggtattttactctcctgcgtagaccctgtcctcagggagaattgtgacatcctgctggacccatcgcctaggttatatattctctcctgcctgggccctttacacagggtggattgtgacatattgctgtgtcctgcatgcagataatgtgactttcctgcctgaaccctgcccacagaaggcactgtgaaatactcctgggcccagtacccaggttatgtgactttactgccacagccctgcccacagagtggacattgacgtatttttggtccagcattcaggtgatctgaatctcttgcctgctccattcacacagcttaaatttagacatatgtattttcaagctcttagacattatagtcaagcttatatgggaacccagccaataagagtaattttgactctcttagctagattttggacagtgggtagagtcctggatcacctacgtttagaaaggtcacagaggtttataaaatttatgcataattggccaggtgcagtggctcatgcctgtaatcccagtcctctggggggccaaggcgggtggatcacctgaggtcaggagttcaagaccagcctgcccaatatggtgaaaccccatctctactaaaaatacaaaaaattagccagttgtggtggtgtgcgtctgtaatcccagctactcaggaggctgaggcaggagaatcacttgaacccgggtggcagaggttgcagtgagctgatatcatgccatcgtactccagtctgggtgacaagagcgagactccatctcaaaaaaaattatgcatactttagaaatactttgtgtgctacagagaatgtaataatagggtctaccacacaggtaagattgtgacttctcacaggcataccaagccaacaattaggattgtcacttccaaacatgaaagaagcacactggtgatgtcctgaacctcacatgcagatgcagttcacagttaaaattctgactgtcatatgtaaatctgggaacaggttgaatagtgactgatttctggacccagctcagaggcacagtgattagttgcattacctggacctagccaataggagatatgttgactcttataggtagccttcaagcaatgggcaaggtcctgggctttctacttgtatgaaggtcacagaagattgtaaaactcatgcatgttgtatgatcccttccaatggtacagagagtgtcataacagtttccagcacacagttaaaattgtgattctcagctgggggcagtggcgcatgcctgtaattccatcagtttgggaggccgaggcaggcggatcacgaggtcaggagatcaagaccatcctggctaacatggtgaaacgctgtcactactaaaaatacaaaaaattagctgggtgtggtggtgggtgcctgtagtcccagctactcaggaggctgaggcaggagaattgcgtgaacctgggaggcaaagcttgcagtgagctgagatcgcgccactgcactccagcctggacaacagagtgagactccatctcaaaaaagaaaaaaattgtgattctcataggcataccctgccaacaatgagggctgtcattctcacaaatggaaaaagacttctggtttggtcctaaatatcacatgtggatgcagtccacagttgaaattgtgactgttatatttggatctggccacaggtaaaatggtgactcacttctgtatccaactcacaggcatagtgagaactctcacacctggatctagccaataagagagatgttagctctcattcctgggcttaggacaatgggtaagattatgagtttataccagcacatagatccaagagtgggttgtggctctcaggcataccgtataaagccctcaggtgtcaccaagagtgtggtaacagggcccagtgcacaggtgagatagtgactctggtatgcacgcccagttcacagtaagaattttcaccttcttaaatagccacagtccactgttgaggttctgaatctcaaactcaaaggagctgaaagttagaattgtgactctcatatgaggatcaggtccacagacgagatagtgaatcttggaccaacattcaacacaccggtgaggctgtgactcttctaccaggacacagtctaagaattgaggctgtcatgcacaaatccagtctactattgagattctgactcgcatacttagaccaaacactcagaagatcttgactatgatctctagagctggaagtgtttgggattgtttatctcatccctgaatctttctgcaggtgtgattgtggcatatgtctttgcccataccctgagtgattttagtttcctgcctgagcccagcccatagatggaattgtgacatataccaaggccaagcaccaaggtaatatgactcttctcatctgcctgaacctgtcacttagaagtaattgtgacatatttctgaatccagcacgtgggtgatgtgactctcctcttgtgcctaggccttgcctacaagaaagattgtgtcatatcactgagcccagcacctatgtgatgtacttcttctgccatagttctccccacataagacactgtgacatatttctgggccaattacataagttaaatgagtctttgcttatgcctggatctcaccctcagaagaacttatgacatgttgctggacccagcacctaggtaatttgagtcttctctgctgcctggcccctgccaacagaagggattttaaactattgcttaaactagcacataaattttgtgactcacttcttttgctaagccctgctaaccgtgggaattacaacatattgctgaaaccaggataatgcaacaatcctctcttgcctgggccttgcccacagtgggcattgttacatattactgggcccatcttctaagtaatgtgactgtcctcttctgcttgggacctgcaacatgaaagactgtggaatatcgctaggcccagaacccagttggtgtgactctcttctttcttgatcctgctcatagtgcagattgagatattcctgtcctagcatccaagtgatgtgactcttcttcctggttcctagctacaggtgggattgtgacatatgcctgggacgtggtcactggtacaatgatgacacccacaaacttcaacccacaaaccaggagaaatattgattctgtctgctaggctttgggcaacaggtaaagtcttcgtctgttacttgcatgaaaggtcagagaaaattacaatactcatgcaaattgtataaagctttcagctggtgcagagagtgtcataacaaagcccagcacacaggtgaaattttgactctcaaatgcacacccagccaatagttagaatttttacccacacacatgtttttagcctacagttaaggtcccaaatctcacatgtaaatgctgttcacagttggaattgtgactggtatatgtggatctagccacaggtaggatggtaattaacttctgaacccaactgacaggtgtaatgatgactctaatacctggatgcagcaaattagagagaggttgactctaatacctgtgcttagggcaagggtacaatcatgggtcataacagcacaagagtctcagagcagattgtgactctcaggaatattatacaaagcctttgagtggtacatggaatgtcatagcagtaccaatcacggaggtgacattgtgattcttatatgcacacccacccaaatgtaaaagttgtcaccctcccacagggacactgatcaccttgaggttctgaatctgacactaagaggcaatcgaaagttaaaattgtgactctcatatgtggatcccatccacaggtggggtagtgactcttgagaaagaattcaacatgccggtgagcctgtgactttcataccaggacaccgtccttgggtgggattgggactctcattcacagatccgatatatcattgaaatggtgagtcctgtacttgcacataactcacaggagatgttgactctcataactaaagctgagacatgtgcagaattataaatctaaccacagaagcttcatgaatgtgtgatttttacagacctatttgcctagcatttgagtaattccactcgtctgtgtaggccaagcccttagatggtgttgtgacatgaattgagtcaagaatctaggtgatgtaactttctttcctgggtgctgccctcaaaggagattttgacatattgctgggcccagcacattagtgatgtgattcttttctcctgcctggttcctacacactgggagcattgtggcatatcactgagcccaacacctaggtgatatgactctcctcccatgtctgggccctgcccacattagggatggtgacatatcactgggcccagcacccaggtgaagtgaatatcctctcctgtttggcttctgcatacaggggcatggtgacatactgcagtgcccaacattatgataatgtgattttactgcatgggcagtgttcacaggatggtattgtgacatgtaagtggacccagcacctagataatgtgactctcctctcctgcccaggccctgcttatagagcaaattacgacatattgctgagtctagcacctgggtgatgtgactctcctgccttagccttgctcacaggggacattttgacatatctttgggttcatcacctagatgatgtgactctcttcttctgcctgtgctttacccacaggaaagcttggatcatatcactgggctgagcatccaggtaatctgattctgtttttgagccttgcccactgggggcattgtgacatttcactaggcccagcatttaggtgatgtgactctcttgcctgggtcctgcccataggggaactgtgacatatttctggtccagtgcccaggggatgtgatgctctagcctggtctctgctcccaggtggaattgtgacatatacctatgcccggctaacagggatgaagatgactcttgtacctggactcagctaataggagagattgtaactttcatagccaacattagggcaaccagtaatgtcctgggtttcctaattgtatgaatatcaaaaaggattacatcacttactcatattacataaagcagtcaagtgtacagagagtattataacagggctcagcacagaggtgagattgtgactttcatatgcacacccaggcaacagttataactgtcactctctcacatggacacagcccactggtaaaatcctgaatctgactcatgaacacagttcacagttggaattgtgactatcatatgtggatacagccaccagtcaaatgcggactcgtgtatgaactcagctcacaggaatggtgataactgtcatacctggatccaaccaataagggttcattcacagttttctaatggctctacgaacaacagaaataaaaaaggtatctctttatggggtatacttatatgtagagaattttgctgccaacttatatataaaaaaactttcaccttgataggtaaaagatgaagggctaatgtgagtgagaagttttaaagaaacatttgttgcctcataatatcagaaacagaatattgatccactgcttttaacctacttcataagtcaaaaataacttcttcagaataggttaaagagcattgccagcaggccattactcttctgaatgggcatcatttgttagatcattttttccatggcttagcataaatgaagcaatggttaggaatttatcccccaaaatagggctgtatagcagattctaatgtaaaggctgtggttacacaataggtattaaatgttctaactaaagttgtgctaaataatagaatttcttttgattacttactggataaacagagaactacttgtgtaattgctaatacttgtagttgcacatggtagaatacattgtgtattacagagatgcagttgtaggggattaatgaacaggctgcttggttgaaatgagtagatcattatctagctaattatttaatctattggattttagttggttgttcatggggaccttggctaagaagcatggtttcaactattttttttttttgtttttttgtttgtttgtttgtttgtttgagacaaagtcttgctctgtagctcaggctggagagcagtggcatgatcttggcttaccacaacctccacctcctgggttcaagtgattctcctgcctcagcctccagagtggctgggattataggtacgcattactgcacatggttaatttttagtatttttagtagagacagaatttcaccatgttggccaggctggtcttgaactcctgacctcaggtaatctgcctgcctcggcctcccaaagtgttaggaaacaggccaccgtgcctggcctgtttcaacttttggcattattctcctgctagtcaaaatagtagtctcccaggccgggcgtggtggctcacacctgtaatcctagcactttgggaggttgaggtgggtggatcacctgaggtcgtgagttcgagaccagcctgaccaaaatggagaaaccccatctctactaaaaatacaaaaataaaattagctgggtgtggtggcacatgcctgtaatctcagctactcaggaggctgaggcaggagaatcacttgaacccgggaggcggatgttgcagtgagctgagattgtgactttgcactccagccagggcaacaagagtgaaactccatctaaaaaaaataaatgaataaaattgtagtatccctactgcaccgtattctctcaaaaattataaatgtttgcatgcagtcatctctagaatgttaaatagtctcttgttgactggcctgacagaaactcaaagacatatgtgactatgaagacaccataacctgtgaataacattataaggacaaaaacccgaaataatggaaattgagagtgccactaaggcctagagttttggtcacactctgacctacgtaagaacttcaccaaaaagccagggttttaaaaaacaaagttggcggggggtggtggctcacgtctgtaatcccagaactttgggacgccggggcgggcagatcacaaggtcaggagatggagaccatcatggccaacaaggtgaaaccccatgtctactaaaaatacaaaaattagctgggtttggtggcgcgtgcctgtaatcccagctactcagggggctgtggcaagagaatcgcttgaacccaggaggcagaggttgctgtgagctgagattgtgctattccactccagcctggtgacagagcgagactccctctcaaaaaaacaaaacaaaacaaagttattggaggccatcgttctaaactgagcttgtacactagttccaaacagaccaaaccaaaccaaaatgagtcacctgtgctaaatgtgacataatccaactgaaaattgaagaaaataggtagatcctaaaacaggccaggtttatatttttcttctggaaacagcagatttcaacacaaggaagccccttctaatcctttaaaaaataaataataggccagacacggtggctcacacctgtaatactaacactttgggaggctgaggtgggtggatcacttgaggtcaggagttcaagaccagtctggccaacatggtgaaactccatcgctactaaaaatacaaaaattagccaggcatggtggcaggcacctgtaatcacagctacttgggaggctaaggcaggagaatcgtttgaacctgggaggaggaggttgcagtgagctgagattgcgcccttgcactccagcctgggtgacagagtgaaacttcatctcagtaataaacaaacaaacaaacataataaaataaccggaagcccatgtttctacttaaaaaaaaaaaaaacacagttctgctattttacagtaggatttgacactacgtaagtactcttttttttttttttgagatgccgtcttgctctgtggcccagactggagtgcagcggcgagatttccgtgcactacaacatctgcctcctgggttcaagtgattatcctgcctcagcttctggcgtagctgggattacaggcacctgctatcatgcccggctaatttttgtatttttgtagagacagagttttaccatgttggccaggctggtcttgaactcctgacctcaggtgatctgtctgcctcggccttccaaagtgctgggattacaggcgtgaacaaccacgcccggccaataagtacatttttgatgacaacagagtgatatcaatatctaaagttttgatatatctctcaaaattgagaagatgaccaaaagggagaaattgttaaattaattatattctaatgctgccactttcatgtttaatttttttgataggttttttttcatactaaactgaaacctaacttgataaataaatagactgtacccattcttgtaccagccacattgtattggcaaatataagaatgtcaactgttcaaatcacgttcaaataaggcaaattctaagctgtaatcaatatggctctttctgtacatccttgaattttctgtatgccactttgctttttccaccatgtagctatgctggagtatctctgagcctactctggatccacagggtatctgatttgcaaatcattttttgctcagtttaagcctgttaaatttaatttctctaaagttttttttttcttttacaagttttgaaattatgtctatgatgaaaaataaataatattcttgggctttgactttttaagcttatctctcagcttttctttcaaattatcctatgtctgttcaaaatgctcctgcaattttttttgagacagtgtctcactcttttatcctggctagagtgtggtggtgtaaccaattatttctcattgtagccttaattgtcttggctcacacaatcctcctggttcagtaacctgggactacaggcaggcaacatcatgcctggctaatttttaaaaattgttttcatagacataggatcttactatgttgcccaggctgtacttgaactcctgaacccaagtgattctttcaactcagcctcccaaagtgctaggattacaagtgtgaggcgccgtgtgcttctgcaatttcttgacaggactattctcaataataaagagtactacacaggcacaaatctaaaaaaaaaaaatccagcttctagtgtaaaagtataattctccagtatttcatgggtctgcagaagccccatctatggggcagcattgatcaacaaattcagtttattctgagtttcagcccagccacttagtaggtgtgggtctttggacaagtttcttgatgtaaaagagttgtataaaccacatatgcaaaaaaggcagaataatattgattgtaaaaattgcagcaatttttctttttttctttttctttttgagatggagtctcattctgtcgcctaggctggagtgcagtggtgcgatcttggctcactgcaacctctgcctcctgggttgaagcaattctcctgcctcagcctcctgagtagctgggattataggtgcgcaccaccatgtccggctaatttttgtatttttcttagagacagggtttcgccatgttggccaggctggtcttgaactcctgacctcaggtgattcacctacctcggcctcccagagtgctgggatgacaggcgtgagccaccgtgcccggccatagcaatttttcacccctcctatatccatgcccattgccagatgcttttacagctgctcccattgagatacagaatctgttttacaaagcttaaatctggctgaccttgtttgctcaggacagtagaaacctgagaaccgacagtgtgctagtttggtgaagggctgaaatggtcttgaatactacctttttctttttaaagtttggcaatggccgggtgcagtgactcactcctgcaatcccagtattttgggaggccgaggcgggcggatcacctgaggtcaggagttcgagaccagcgtgcccaacatggtgaaaccttgtctttaataagaatataaaaattagctgggtgtggtggcggatgcctgtaatccaagctacccaggaggctgaggcaggacaatcacttgagactgggaggcggaggttgcagtgaggcgagactgtttgaatgcactccaacctgggcaacagagcgagactccgtatcaaaaaaaaaaaattaaaattcacatgtggctcacattttatttcagaagattgcctttttaaaaaaaatcttggccgggcgcgatggctcacgcctgtaatcccagcactttgggaagccgaggcgggcggatcacctgtcaggagtttgagaccagtctggccaacagggtgaaaccccgtctctactaaaagtccaaaaattagccgggcatggtggcaggcgcctgtaatcccagctactcaggaggctgaggcagaagaatcgcttgaacccggaaggcagaggttgcagtgagccgagatcgtgccacggcactccatcctgggcgacaagagcgagactctgtctcaaaaaaaaaaataataaataaataaaatcttaggctgcctctttaaagaactgaagccaggaaggtcataaaagccgaaattttaaaatagctgttattatattcttttcctttgtgaatagccatattcaaacaaagttaatggcaaatcccctctgaggtgggcctggctcatttcagggaggaagccctgcctgaaaacgccacagcttaggctgtcactctttcttcattgaacccagcatctgatcacatcttctgtcactccaggcctgaatgggcggggccttaaacggcatccattcagggatgcttgactaagagccgtccaatcagacccgcagctagagcggacagggcggcttccgggatttggcgcggccttttgagttcctggtctctgtggcctcctgacctacatgcattgggagatccacagctaagacgccaggactccctggaagcctagaaatggtgagagtaccgggtccgacatcccgagagaggggaagggctggttggaaccggtgggaagtggctgtggcgggactcaggcctccctgctgtcagccccacaatctgcgctcggagttctagcctggcccggcctcagacaccttcagcgataagatggcggctgtactgacagccgggcccgagcgtcttgtctcttccctggcagtgaccgtgccctggcctggagccctctctgggcagctctgcacccgcagcgccgagtctctcccagattgtgcagggaccaggggagggtcgtcaggggagaatcctgactcgggtgaggagttcctgaatgggagcagctttggtccgtggggttcctagttcatcttttctctgaaatatttatgggagtcatcgcaaaaatattaaagaatttaaagagttgttcaaaaattatagagcacccctatgggttgtagtttgtggtccattagaggggcttgaagaaaagacttttataagatgcatgatgaaaaaacccaaattctgtaatcaggcacagttacgtagtttcctaatttccaccttgagcctacaaatttcctgattatgtaatcagagcttaattagctgtttatatttggttaagactgaatttcgtttcctctaatgtagtaattttttaaaaataaataaatgcatttgagttagattttttttttaagtaggaatccagagagtagatttccacctcagcctaattccatatcacttaactattttcttttttttctttttttgagacggaatttcactctttcgcctagactggagtaccgtggcgcaatctcggctcactgcagtctccgccttcctgtttcaagcgattctcctgtctcagcttcttgagtagctgggattacaggcgcctgccaccacggccggctaatttttgtatttttggtagagacggggtttcaccatgttggccaggatggtttcaaactcctgacctcgtgatccgcccgcctcggcctcccaaagtgctgggagtacaggcgtgagccaccgcttctggctatgccctgcatttttcacatgtttttcaagaagggtctcaaatgtaccccccaatcctcctttactctagcctaactgtggcttaaagtaaaatactaaatttccagctccttctgacaattccaaacgctaacttttcctccgtaataaagattattaattttttttttcttttttgaaacagagtctcactctgttgcccaggctggagtgcaatggcatgatctcggctcactgcaacctccacctcccgggttcaagcgattctcctgcctcagcctcccgagtagctggattataggcacgtgccaccacgcctggctattttttgtagagacggggttttgtagagaccatgttgggcaggctggtcttgaactcctgacctcaggtgatccacccgcctcgacctcctaaagtgctgggattacaggcgtgagacaccgcgcccggccgctatttgttttttagcgtacttttttttttttttttttttttccgagtctccttctgttgctcaggctggagtactgtggctcaccgcaacctccgcctcccaggctcaagtgattttcctgcctcagcctcctaggtagctgggattagaagcatacaccaccacgcccggctaatttttgtatttttagtggagacggggtttcaccatgttggccaggctggtatcgaacacctgacttcaggtgatctgcccgccttagcctcccaaagtgctgggattgcaggcatgagccactgcgcccagcctggtgtacattcttgataatgtattttaattaatctttttttttttacagcgcattggatggaacatttaaagagattcgttttctatttttaagtcttttcctttagaagaaagcaaagaataatccccttgcaatgtactgtaaataaatctttgtgtgtctttctctttatcttccctaggcacagagatcttatgagaacgttttggggtaattttttttttttggaaactttatggggttttgtgtccgcagtcaccatttagtgtttttctccttctggattttagtactctctgtgaataaacgaagatactgtgtctatgtctgctacagtgtctaggtaatatccgctcctgggtcgttttctgccataggacaacctgaggtatggagtgtagcctctccagggaggaagttgatgccctggggctgagaggcatctcctggcatattcttcctttgaaaagctgacatttagacattaagattgtcttcacctaacccatcttccatttcttggagacacattgctggtcagccaatcagatgctggtactgagagcaaaacagaaataatttctgccacctggattctctaagatttgtgaaaaaaaaatagtatccccaaagacaggaaaaaaaacctgaccccagtgagaaagtgcaagaatttgcaaagtaaactgcacttgaggcactcactggggcatagtgcagtgtctcctcagagggggtcattgagcatttaactgagcagggtggggtgggagaatctaagtgattggatgacctgacttgacacatgactgagacacatctgtgtgtgtgattttttttgtttgttggttgtttttttttttttgagatggagtttctctcttgtcacccaggcttactgtatcctctgccttccgggttcaagcagttatcctttctaagcctccggagtagctgggattacaggcgcctgccaccacacccagctaatttttgtattttttagcagagacggggtttcaccacgttggccaggctggtcctgaactcctgacctcaggtaatccacccgcttcagcctcccaaagtgttgggattacaggcgtgagccaccacgcctgtaatccctgggtttgccaccttgaaaagatttgtttgcttatattgacttcagtttcttaactgaaaattgcattttattagtagagcttgaaaggttaaaaagaaaatgtttacaaagggcataaaagaggtgagtttcaaaatatattccatttgttaagagttcgcatttaccgttttttttgtttgtttgtttttgtttgtttttcccagaatgagtttaggaaacttctcaggtgtgtttttatgggtaatttcaaacagaattccaaggcttagattttgtaatgctatcaaggcaaataatagggaaatctctcttttattttggctgtagaaaataaatacatttccacaagaaaatgtggtagataattggtgagttgcatagattcatgaaaacaacagtttttctttctgtatggtaaatttctgacagtgaatatttttgttctatagcctgtgatcttgatttctgattttaatgctaaatattacaagatgaaacttggtacctcttaggaatgttcccatatgattgtttactacataatttttaatgcaaataataaaataatacatttattgtctgaaaggaatagatactttgggttttcttgttgaggtatgaaatgtaagcaccttaaaatttttttccttcatatgaacactgtgtttcagtaattttgctagatgttttagttttaaaaactgagtaaataactgacataaaaattgaagcttgagcccagggactccaagctaaggctaatattgagcctgcaaaaggaggttattaaaggcaccgttagttcttcctggggagcctccgctgcagatttcccagcctgctcaccctagccatggaagaagcttttattccgagagaagctacacagccctggaaagctggggaccctcaggcagacgcagttaaggttaagatggaatgggactgaaaggatctcactgaagataaagttattcttgctttgaggcagtttctagacttttagaaataaaacaaagtcagatttatgtaaaaaaaaattaaattctaaaggagtattgcagcaggaggaagtaccaaccataagatatttaaggattgcaaaggataggcagacaagggctttcttccataggaaggagcaaataagattagaaagaaggtggtaggggaatggcaaatggagggtgaaaaatcagattctagatcacagaatattttatcctgaagtcagcatgttcttagaagggacataaaattgggtttattttggctcagactgagaatagctcaaagttcaggagctgtgggaagaagataaacttaagtgaagtttgattaacaagtattctattttgaccactgaagacaaattcagccaatttttctatgagaaaaagatttgcagagtctatgtctggctgtgataggtaagcacaaaaaggatagagaattttatttattatagctatttaccaggattatctttatgcttcatctttcttccatttgacatttcctgggttgtatcttttattataaactggtcagcataactgcagtgttttgctgaggtctgtgagtagctctatcaagttattgaacttgagggagattatggaagtccccagtttttaaacagtagctcagaaacacagatggggatggcacgattactcatgcctgtaatcctagcattttgggaggctgaggtgggcagatcccttgaagtcaggaattcaagacgagcctggccaacatggtgaaaccctgtctctactaaaaatacaaaaattagctgggcgtggtggtgtgtggctgtaatcccagctacttgggaagctgaggcaggagaatcacttgaaccctggaggcagagattgtgccactgcactccagcctgggctacagagcgagactctggcttaaaaaaaaaaaaaaagaaagaaagaaaaaagaaaagaaagaaagaaagaaaggaagaaatgtagatgggcccatggagtttgtgactggcatctgcaataaggacaatattgtgggactgagccctgaaccaaggtctgtgctgactctgggtggtttcagaattcaaatgttagacagtgagttggtgttgaagaattgtttggtgttaacaaacaatttggtgccagaaaaaatatcatggaggcctggcctggaataaaactctgggcgtgtgggaaggagaggctctgctttcctgtacacaggccgtcacactgctcattgttctgtgattccagatctcctcttagggtgagagaggactgaaaacttagagaaaaggagttctgatgacagaccccatttttccacagctgccaccacaggattcccacccactcacagtcatgcccactggacattgacatgtgcacagcccttccaggactaggcaccaccctcaaaaatttaaccatggcatttttgatcctagtgttttttgccaaaatcccacaaaattgtctacaaatttttggcatatccctacccccagacactgaatctgcagcagcaacctcttttctccaccaacttggggttctgggccacctgttcataatctcacctgcctgcatggacccagaaataagtagcacaagccagtcctgcctacactgcactcttctccacccattgagttcctttctcttaactcttatttttgttttaggggtacacgtgcaggtttactatataggtaaaattgtgtcatggaagtttgatgtaaattattttgtcactgaggtactaagcataacaccaaacagatttttgttttttaatcttctttgttctcccactctccacccccaggtaggcctcagtgtctgttgttttcccctttgtgtccatgtgttgttattatttagctcttacttagaaatgagaacatggagccgggcacggtggctcacacttgtaatcccagcactttgggaggctgaggcgagtggatcacgaggtcaggagtttgagaccagcctgaccaacatggtgaaaccccgtctctactaaaaacacaaaaattagccgggcgtggtggcacacgcctgtaatcccagctactcaggaggctgaggcaggagaattgcttggacccgggaggcggaggttgtggtgagctgagatctagccattgcattccagcccggtcgacaaagctagactctgtctcaaaaagaaaaaaaaagaacatgcatttgcttttgtctttcagcattagttttctaaggataatgggtcatagtttcatccatgttgctgcaaaaaacatgatcttgttcttttttatggccacacagtattccatgatatttatatactatatttttctttttatataaatattctactttattttcttcttattttattattattattttttgagatggagtttcactcttgttgcccaagctggagtgcaatggcatgatctctgctcaccgcaacctctgcctcctgggttcaagtgattctcttgcctcagcctcctgagtagctgggcttacaggcatgcgccactatgcctggctaattttgtatttttagtagagacagggtttctccatgttggccaggctggtctcgaactccttaccttaggtgatctgccctcctcggcctcccaaaatgctgggattacgggcatgagccaccacgcccggccttctagaaatggggtttcttcatgttgccttggctgttcacaaactcttgaactcaggcagtctgcctgcctcggcctcttaaattgctgtgattacaggcatgagccaccgcccttctgtattatattttctttatccagtttaccattgataaggattcaggttgattccatgtctgtgctattgtgaatagttctgcagtgaccatgaatgtgcatgtgtttttatggcagaataacttatatttctttgggcatatacccatttatgagggtgctgggtcaaatgctaattctgtttttagttctctgaggaatcaccaaactgcttttcacaatggctgaactaatttacactcccaccagcagcgtataagtactcctttatctccacaaccttgccagcatgtttttttttggttttttttttttttttttgagacagagtctcactctgttgcccaggctggagtgcagtggcatgatctcagctgattgcagtctccacctcctgcttcccaggttcaagcgattctcatgtctcagcctcctgaacagctgggattacaggcatttgccaccatgcctggctaatattttttatttttagtagagatggggtttcaccatgttgtccaggctgctctcgaactcccggcctcaagtgatccacccatctcggcctcccaaagtgctaggattacaggcatgagccactgcgcttggccctgcatctgtaattttttgatgttttaattatagccattttggcttgtgtgagaaggtatctcattgtgtattttctttgcatttctctaattaatgatgagtattttttttcatatgcttgttagccacacgtatgcctccttttgaaaagcatccgttcatcttctttgcttcctttttaataaggttgtttgtttttccttgtaaatttatttaagtattttatggattgtggatattagttgtttgtcagcagcatagtttgcaaacatattattctattctgtaggttgtctgtttactctgttgatagtttcctttgctgtgaagaagctctttggtttagttaggtctcatttgtcaatttttgcttttgttgcaattgtttttaatattttcttttttctttttttttgagacggagtttcgctcattgcccaggctggagtgcaatggcatgatctgggctcactgcaatctccgcctcctgggttcaagtgattctcctgcctcagcctcccaagaagctgggataacaggcatgcgccaccatgcctggctaattttgtatttttagtataggcagggtttcaccatgttggtcagactggtctcgaactcctaacctcaggtgatccacctgcctcagcatcccaaagtgctgggattacaggtatgagccaccgcaactggcctgtcccgtttctttataacgctcatgtttctcacgctgagaatagttgtgcactttgggtatttaaagagaaatatttttttagaggaatattttctggtggacttgatcaatattatatctaatctgagttttgtttttaaagatgcttttaactttttattttctcttgatataatcttgctcagatggagagctgttttttgcgtgaattctttgggtttctgtttcagaagccctattagtatcccatgatatctgtgaatgaggtgggctgtcacagggagaacttagacctatctctatccggactcatgctggaaatccagcagtacttttttcatgtcaccattttaaatagaagctgaggctgaaacactgctcccattcccattatcgtgaaggtgcagtttcacccaggaggcctgcaggctctcctcctgcagctcaggcttcattgtctgatgtgacactggagtgctgctgtggcaattggggttcatgtaagatgtgagctgccagctatgagctttgtgttgtgggctgtgtgtcaatggcagatagtaggcgtcaagagaggacatggccatcaggagagggcaagcagggtgctctagcccagtgctaaaggagttaaagagccattgctttaaaatataaatagccaaaaagataacaccctattcagccatttctgtaggagagtgggagcctaccttcagcaggcacttggcttcatgttgcagaattaacctcctgttatgaagatgtgaaaagtttattttgtcattgaatataaccaataagcttacaccgatggccttgccaattgccaggtgaatttaggatgaactacatatgacatggtgctgtaaatttttccacttgtggactaactgtggtgactgtctttctggcttgacgatctcttgagcagattgactgtgatgcgtgtcacattcaggttaaattgtgtaataaaacagttttctttctgttctatcattttggagtttttctggggctggagaaaatttttcttttaattatattttccacacactgtctagaattaccagacattatataaactcataagatgccaaccaagctttactctagaggagacttcctctcaggcttccagtcaactcacagatttctacaaacttcacagggtagcaatcaaccatttcacctcttttagtgactgttgtgtcttcagacctgaaactgattcagagaccagggggaccagaaacccaatcagagtaacatgtgagtgttgagtagacatgtagacatgagaatctccactctccccttcctcctattgctaaaatacccacaaatatgcaagtaacacctgctgcagatccaaattctgaatctaggtcttgagatctgggaaccaaaaaaaaagaaaaaaacaaacctttcatctgaggaatgcaagtccttttagttgtcaaactcagagagacattaaaatgagaacacaattttgtctttctcccacctttgaactatgttttgttgttgttgttgttgttttgagacagtcttggtctgtccccaaggccagagtgcagtgacgcaatctttgctcactggaacctccacctcctaggttcaagcgattctcctgcctcagcttcccaagtagctgggattacaggcatgtgccataacagctggctaatttttgtatttttagtaaagaaggggtttcactgtgttggccaggctggtgttgaactcttgacctcaggtgatcgacccgcctcggccttccaaagtgctggaaaattacaggcatgagccactgcgcctggtcctgaactaagagttttttttaatctcttaaaactgttaactgttgccactagtagctataaattaataatgccacactggacactataacccatactctaaattttaatgatgtatatccaatcaataatcaatgtcatttctgtaaatataataaaaatttctggtaaacaactttgtatcagccatctctctctccctctctttttgccttttcagatcaacttgtaactgctcctaatcaaagtgtagatgacaggcaacttgaaggtttgctcccaggttacaatcctcaagctttgcccaaataaacggtctacttacattcatgttgccttagctttttttcttttaggtagacatatctttcagaatgtgctaaagcagcctctataaggtgatctttcctttgattgtactctgcttgctgtaacacccaagaatgaagagccaggttgatcccacctagaatctgcaaataaggtctgttctcttcctggaatttacaagataaggccagactttgaattgagaatgtagagaaaactaactagacattttatgcattgtcagatgtcaacatagacatcttaaagttcctctttgagaatgtgattctttcagcttctcagatcttgtccagtgacctgctacagttatgtgagggccaccaggtataaatagaatctgatggcagaatacgtaagtgtgaacaagcatcttcagagttatagaaaggtgataatgtatccagagccataaccacaactacacctgtccctaaaatgtgggactggagtagaatattcctgttcttcctcttacctaagagctggataatcaggacaggtgatccaggttctggagcttctccagggcagtttaattttttgtttagaattagcctgagtctctcctgtctgttttatcattgggccatcagcccagggtcactgggaactctcacaataagctgggtgtctttgagacatttgaggatgtccagagcagaattgtgccaggttaacaaaagtggttaattctgcttctatctcagtgtaaaaaattgagtcttcttgtgtttgctcctccccttacacaagaaatgactttggtgggtacccagatgaatgtttctccagttttcagatacttgggtgaaaaacaaccaggatgtctggagactcaaacaaataaacaaattgcttttattttatatggcgattagaaaaatagatgaagcagtcatccaggaaccatccaggaacttttagactagactagcaactgaataaagggttgaattaagcatcatatggttgattcattgaacagatgtgtgcaaaaaaatttgcctttatttgggcccctttctttatattgtagtgacttcttatgtcatcacctgaagggatatttatgaacagaagagttgttattattatatgcgtttctattacctgctaagaatacatatttatcttctaataattaccctagagaaccttaagacatttatttaaattgcttattagtatgcattatataatggacagggcagtggctaaaaaaaattatacaaactctgagatttaagtttctcttaggcaagtttaggaaagcagaactggaaatacgccagtggcacagagaacagaattctacataaggtccactccctgccccagttctgttcagattcactctatttggggtcttgtttagatctggccccactctggagtcttgcctcacagaactgattggaagagatgagagttttggctggtgaatcctgctgcctttctaaagctggtacttacaattttctgaaccccaaaggagataaagggaaaaataaagtatgtattttaatgtcttaatttttaaattttctattaaatcagtgcttgcagattccatttagcatcttgttttctattcctgcagattcagtagttgctccactagtcacacaaaaaaaatataaacacaataaaagtttctctaaactgcgttaaacttttctctattcaggtaatttgtctacatttagcttttattgtatacattttctttaaaaaaccaagaacagaaacagaagatgaaatacatgtgctgggcccttaacctaatgctgggaattattaaatacttagtaccaaatcgcagtgtgttatgaggattaaatcacataatgtattattcgtattagtactctgcaacatactcttgagcacatagtacctgcttaaacattgcattagtacatgtgtatatgttgttttccaaatgtaggcttattcaggcactcctaccttttattgcctctgtaaactttaaagaaccagcaaagaatttgatgctttaggatggagattagttatcttcatttgtgccagaagtaattgtgttgtgaaaagagtacggagtttaagggactctgtgctgtgcctgctttctctaatgctaataatgagcccagggggagcatcatcagcattgacaggggacttagttaaaacacacattcatggccggcgtggtggctcatgcctgtaatcccatttgggaggccgaggcgggtggatcatgaggtcaggagatcgagaccatcctggctaacatggtgaaaccccatctctactaaaaatagaaaaaaaattagccgggcatggtggcaggcgcctgtagtcccagctacttgggaggctgaggcaggagaatggcatgaacccgggaggcggaggttgcagtgagccgatatcacgccactgcactccagcctgggtgacagagcgagactctgtctcaaaaacaaaacaaaaacactcatgtaccctttgaaaacctgcagaatcacattacataaagagggactaaaattactgagtggtttataagctcgttaaagcttgagagacaatgcttagctaagtggttataaacccagggttctattagtttggtgcaaaagttattacagtttctgccattgtaattaatgtggattacttagatgtggatactcagattacatggccaattcacagaaatatctttgctcgtgccctttccacgggttctttttattgttggacacatccatgttgttttaattaagagcctcatgtgattctaaggtgaggccagaatcacttatgaggggttgaagatacactcatgagagttcagtttcacctgtttactacagggtgattatagggcctgttctgtttgggtttggtatggacagggcagtgtggcccatatttttattactgtagcagagattgttggtgtctgtagcaggggagggcacctaaagagaggaaaggagaaacttttatttcttcttcatggggaaactcattgttcctgaatttttcatgttataaaggacagaaatggatggactttttcagcgggtcttggtacttctgcctgtgggtgtggtggtagcaggtaaacaggtggtgctgacacctttaaaggcatattctcaagatgcaggtctaatttgtccagagaatctcaactgaaaaggaatcccagagaaggaggagatagggaaaaaatatgccttttttttttttttttttagctaaacacatctcagatcaagaactgcgtccactctgcctcgtggatttccatgcatttagtacttgcaaacctttacttctcttgcgtttttcctccctaatgagtttgttttaactacttttgaaaattttattgatagtcaagggtctctgaacaatatttctttttagagccttttctaagttctccacatcatggctttttatatgccatggaggattctcaccattaatttatgatctgcagtattaaaaatgtttcctttgtggctgttgaacatgggagggtggggatactcaagattcctgttggggaaaagctggtatccttagtaaagatggagaacaggtactgttgaggctccatttgtgttccccattagcactatgcagaacgggattaaggaaatgcttacttaaacaagatgacggccaggtgcggtggctcccacctgtaatcccagcagtttgggaggctgagcaggttggatcacctgaggtcaggagttcaagagcagcctggccaacatggcgaaacctcatctctactaaaaatacaaaaattagccaggcatggtggcgcatgcctgtaatcccagctacttgataggccgaggcaggagaatcgcttgaacccgggaggtggaggttgcactgaggcaagattgcgccactgccctccagcctggatgacacaatgagactctgtctcaagaaaaaatgatgagatttattacccagaaagtttgaaagataattatcaggagataactgctctctagggtgctcaaaaaagactccttaaaatcactactaaaaattacagaaaatgggaaatatctgtatcttgaattttgcataaaactgatgtttctgtatggttgcattcagcctataatttccttttttttttttttttttttttttttttgagatggagttttgctcttgatgccgtgctgggattacaggcatgagccactacccccaaccagcctataatttactttttgggaacaatatttcagcagtgatgctgtgttatgtgtgtatcagcacatcatacaaatttttcctactgctgttgatgtttatgattcacttggataagcactctctgacagatttttttttttttttactataatttttttctttgttattttattttattattatttttgagacagggcctcactctgttgcccagcttggaatgtagtggcgtgatctcgactcactgcaacctctgcctcctaggttcaagcaattcccctgcctcagccttgcaagttgctgggactacaggtgcccaccgccatgccagactaatttttgtaaaggcctttttttttttaattaagtatctttatgcagctgatgtgtgtaaactatcaaatttaatttggcagctgctctttcttagagtttctttgcatatatctgtccttggaaaatgaagagtttcatcttttatagtccagaaaaactggaaaaaacacaggttcttccatatactggatgtttgataaaatattcttcttaggccaaaatcattggcattattggtgagcttgttagaaattcagaaactcagactttattccagatgttctggaaaaaaaaaaaatctccattacaagatctccagtttattgtacacattaaaatttgctaggtaccttctaactcaacatgtcttttccatctcaaaaatacacagaactcattctctatgatgttaatatagcactcaaaaatatacatgcttgtgttaatgcctttaattttatactttattatccagaaaagtatcatatatacactgatgttgtggatcttattccactctttttttcagaattagagaatacataagagaatatttctgtgttgaaaattattttcggccaggcgtggtgtctcacacctgtaatcccagcactttgggaggccaaggcggatgcatcatccgaggtcaggagttcgagaccagcctggccaatatgatgaaaccccatctctactaaaaatacaaaaattagctgggcgtggtggtgggtgtcttgtaatcccagctacttgggagactgaggcaagagaatcacttgaacccaggaggcagaggttgcagtgagccgaaattgcaccattgtactccagcctgggcaacaagtgcaagactctgtcttaaaaaaaaaaaaaaaaaaattattggaggatttcagtcattcctataagtcagaacctgttctctttactctctcatttcaccttcagtcaaattaaaaattctgccgttggccacccggtaaatatgtgtgtatgtgtgtgtgtgtttttttttcagggaccattgacattcacagatgtggcaataaaattttctctggaggagtggcaattcctggacactgcacagcagaatttatatagggatgtgatgttagagaactacagaaacctggtcttcctgggtgagaataacttcaatacacaatcctcagatactgtaaatgtttctttttttggtgttgtagaatgttttttggtaattgatgctttgcataaatgagtttcacatcactgttttgaagaaaagcttgggaatttgtcagtgtagaaaagaatttcttcaagataaacatcttgaagttcaccttgatctgaactttccacattcctgagcagacctgtagtttttactcaccattagcgatcatttcaaaatttagtgacataaaatattgttgcccacaccttaacatctaagtgtcaccaccagcttttgattcagtggtactgggtagagaaattattttatttatttatttatttatttatttatttatttatttatttatgagatggaatgttgctgttgcccaggctggagtacaatggtgcgattttggctcactgcaatcctcacctcccaggttcaagagattctccagcctcagctttctgagtcgctgggagtagaggcatgtgccaccaagcccagctaatttttgtatttttagtagagatggggtttcaccatgttggccaggctggtctcgaacttctgacctcaagtgatccaccctccttggcctcccaaagtgctgggattacaggcatgagtcaccgcagccagcccattttctaaatattaagaaattactgttataaattactgttttgggatgaatatactagaatattctattatgttctctttactgagcacattatttgaagaatatgaggaacattcatgttatttatttttaataaaacaggtgttggtgtctctaagccagatttaatcacctgtctggagcaaggaaaagagccctggaatatgaagagacacaagatggtagccaagcccccaggtaggtggagagtgaacacaatggacaacacagataagacgtccaaaggtcaaggagaaagccagtccttaaaatagattttgggaagctgtgttccaaagaaaatagtttcaggaaagcctgagagtttaaaaaattttactctcacataggggcatcttctgcattgtgctattaaattttctaaggattctactttcccttttgtgatcttccttgaagtttacagtgacagccaaagtcttcttcatggcatataagagactgcacaatctactttttcatattttcaagggaaccataaatatctgcataattttataaaactctgttaggctgggcaaatgtctcacaccagtaaacccagcactttgggaggccgaggcgggtggatcacctgaggtcaggagttcgagaccagcctggccaacatggtgaaaccccttctctaccaaaaatacaaaaatttgttgctcgtggtggcgcacttctgtaatcccagctatttggtaggctgagtcaggagaatcgcttgaattaaggaagcagaggttccttaattctgatgtcgtgccattgcactccagcttgtgtgagaagagtgaaagtccatctcaaaagtaaaaaaaaagaaacaaaaacctatgttaaactgtttttcatgttttcttgttttatcgtgtttaaaatatgtgagagtagtggtttctgttccatttgttttttcatttttctgcataattcatcctgtttttattagtatagtcttgaaatacagtttggaattattatattaagtatgacatcctcctggtttgttttttttttgtcaagattgctttggctattcaaagtttattgaagttttatgtaaattttaggattgtgttttacattactatataaaagatagcactggaggctttttttgagatggagttttgctcttgttgcccaggctggagtgtaatggcaccctcttggctcactgtaacctccgcctcccggattcaagtgattctgctgcctcagcctcccgagtagctgggattacaggcacgtgccaccatgcccagctaatttttgtatttttagtagagccggggtttcaccatgtaggccaggctagtctcaaactcctgacatcaggtgatcggcccacgtcggcctcccaaagtgctgggatcacaggcgctgggtcttttttttttttctttttactgagatggagttttgcacttgctgcccaggctggagtgcaatggcacgatcttggctcactgcaacctccgcctcctgggttcaagtgattctcctgtctcagcttccccagtagctgggattataggcatgagccaccatgcccagctacatttctttttattaaattgtttaatttatatttaaaataattgcttaaagatatgaagttactattaagagtttattatttttttagatacgttttttctcatttcctgttttactgccttaatttttgtttaattttgttgtgacatgccttgcttattttttattctgtttcacatgctttctacaaatgcaacgcagtcatcctgaaatataatgtgatcatgttgaaaaatggagattacataaaacatcttaaagttaaaacaatacattttaatatcataacttcaattgaatacaaaacctatatctttatattttccagtttgttattgatattataaatattatcttgtgtatctattaataaatgtaggcagatttaagtgttgttttttctatttacagaagaagtttaagggttttatgcaccatcattataatagaattctatatgtgtctctatatttacatttaacagagagctatttatttatttatttatttattactattttttttgagatggagtcttgctctgttgcctaggctggagcgcggtggcacgatcttggctcactgcaaccactgcctcatgggttcaagcaattctcctgcctcagcctcttgagtagctgagattacaggcacgagcaaccacacccaactaatttttctatttttagtagagacggggtttcagcatgttggtgaggctggtcttgaattcctgatgtcaggtgatctgcctgccttgacctcctaaagtgctgggattacaggcgtgaggcaccgcgcccagcctatatacattttcatgatgctgtccagcatgattttatttttcaacataatggactcattttaggatttctttttatttatgtgcagtctcactgtattgctcagactaatcttgaactcctggtctcaagtgatctgactgtctttgcctcctaatgctatcggattacaggcatgagccactgtgcctggccaccatgtagcatttgttataggactgtgttagtggtgatgaactccctcacttttcatttgggaaagtctttatttttgtcttgtttttgaagtaaaataattttgaataaagtattacttgttagaactttttttttgagacggagttttgctcttgttgcccaggctggagggcaatggcgcgatctgggctcaccgctacttccgcctcctgggttcaagcgattctcctgcctcagcctccggaatagctgggattgcaggcatgtgccaccacgcctggctaatttttttgtatttttagtagagacggggtttctgcatgttggtcagactggtctcaaactcccaacctcaggtgatctgcccccttcggcctcccaaagtgctgggattacaggtgtgagccactgcgcccagctagaattttttttataaaatcaaaattggtaaagttctcagtttttgtttcttcaagtaatctctgtattactttttcttttatagtcttcttttaagatttctttcataaatatattgatctactttatagtgtccaataagctttacattgcatgtttagtgttttacaattttgtttctgtgttatatattttagaatatgccacctcatagcagttaattgtgttttgatgttttagtttatattatcattttatatgacaatattaaagtctgtacaatttaagaatggatagagcaaaatcaaatattagtctttcattcatatatctgtttccaatatagttatgtttgtttccctgtataaatattatctctatcttttatgactgtatattttttgtgtaggtttgttgtgaatggttgtttaatcttttctaggtaagctgtcataaacattttactagttttagcatctatttgtgaatatattatttttgtgtggggaaaaattttggacttgacaataatttaaaaacttatcagaactttattaggtattattgttcatttttacttgtcaaaaacacataatctttacagtcaaatgtttttaaatattcggtttagtcatattaatggtattgacaatgctatgcaacatatccctagaatgtttttatctcacaaagctaaatcttgacacattgaacagctaccagtttttttcatttcttggtgcttttcaaatgccactatgttttctgtttttaacagtgtaactgctacatatatctcattctatctctgactttttatgactggctcgtttcattttgcataatatcatcaagctttatctttatagttgttaagaatattttctgcttataaatcctgagtgatattccagtatttttatatttcaaattatttctactgaatgatttggtgacagaaatttgcattgcttttagttattggctttcagtaaaaactgtaataattatagatatgcaaatagctctttatataactatatatatgacagtttatatatgtgctgcattctcttttattattctgctttttaacttttatattcatagtaaattgttttaattctgtagctcgtaatgtgttttgaaatcaggaactgtaatgccttcaacattgtttctttttttgaagattgttgagtattttattttctcttgagattccatatacttttgctattgctgtttacattttttcaaaaatgcagttagaaatttagttaaatatcattaaatctgtagattacattgagcagcatggacatcttcaaaatattaattatttcagtttttgaatagatgcattctccagagtgtgctgtttaatttttatatatttataaatttttcaggtttttttctattattgttttataccctcattccattttggtcatacaaagtaatgcataaaaattttgttttatgaaatttgttaagacttttttcaaggagaatcttgtaagatcgtgtgagtatttatttatttatctgagacagagccttgctctgtcacccaggctggagtgcaatggcctgatcttggctcagtgcaacctcctcctcccaggtgaacctgcctcagccttccaagtagctggaattgcaggcacctgaaccatgcccagctaatttttgtatttttagtagagacagggtttcaccatgttggccaggctggtctcgagctcctaacctcaggtgatctgcctgccttggcctcccaaactgctgggattataggcttgagtcatcacaaccggccatatgagttattgagaagggtgtgtatcctgatgttgaggagtgttctctatacttcttttagaaataaatgttttatactctcttcaaattttctctttccttattaatattctatcttgttttatttttattacagaaagtggcgtattaaaatatcctactataattatattgctctctatgtgtttctttaattctgtcaatatttgctttatatatttgaaagccaaatgtgagatacacacacacacacacacacatttgttatgtttacactaaatgactctattattgttaatttccttctttgtctccatatagttttgacttagaatacattttataaaatatgacactttgacttcagatatagcttatgtaatattattttgatctcttcttctctcatttggttagtatctgcatagaatgtgtatgtccgtcttgccactttctgtctttttttatcattaaatctcagctgactcttgcaggaaagtaagttggattttgggttttaagattttttaaataaatccttttattgaaaatatgtctcttgattggaaaattaattgtatatatatttaaataattttctgaaacaaaaacttaataatgttttattgttttatttgattcttgtatctttgtccctcattttctctctttctgccctcttttgtgtctgtttcacttttgtattaatatgcttttacttcttgtttttttcatctaaacatatattctttgtggtaccttggggattacacaaaacctctaaaagatatgagaatatattttaatctagtaaaaagtgaacttcagctgaatacgaaaatgtttctttggctgtgcttggtggtttacacctgtaatcccatcactttgggaggctgaggtggacagatcacttgaggtcgggagttcgagtccagcctgaccaacatggagaaaccctgtctctactaaaaatatgaaagtttccaggcgtggtggcacatgcctgtaatcccagctactctgtcagctgaggcaagagaatcgcttgaacccagaaggtggaggtcacagtgagctgagattgtgccattgcactccagcctgggcaacaagattgaaactccatctcaaaaaaaaaaatattcttcctcaaattttttatttttatattctctagaattctttaaattttatagaataattacaaatgttttctgcaccgttataacaatggtaggaaatttcatttttatgtaagtatgtacatatctttcctagaaaataatgtatttttatatgattatgtgttttcttttttttttttttttgagatggagtctctctctgtcacccaggctggagtacagtggtgcagtcctggctcactgcaacctccacctcccgggttcaagtgattctccttcctcagactcctgaatagctgggattatagacacacaccaccacacatgtctaatttttgtatttttagtggagatggggttttgccatgttggccaggctgatcttgaactcctgacctaaggtgatccatctgccgtggcctcccaaaatgctggtactacaggtgtgagtcaccacacctggcctgtcattttcttgaatcatattattttcaatggaagaaactgctttcagtatcttttatgtatagggcacatgcagtgccaatatactttttcagaatttgattactttggaaggtttttttatttttggcaggacagatttgctgatggtattattctcacttgataggtatttttccaggactttgactatatcacacagttcccttctggcctccaaaatttttgttgacagttcagtggttatctgaaagcctgcttgtaagtgatacatcacttttttcttgcagtttccaagattctctttttgtctgtgacttttaaaagtgtgcttatatatgtgtttgttataagtatctttgtgtgtttcctagtttgtttgttgagcttcttcgtttttattttatctttcttttagaatttttttgtttgtttgtttttgttttttgagacagagtcttgctcttgtctcccaggctggagtgcaatggcgtggtcttggctcactgcaacttccacctcccaggttcaagcaattctcctgcctcagcctcctgagtagctgggactacaggtgcttgccaccacacccagctaattttttgtatttttagtagagatgaggtttcaccatgttagccagtatggtctttatctcctgacctcatgatctgcccacctcggcctcccgaagtgctgggattatagacatgagccactgtgcctggccagaattttttagttataatttctttttgtattttttacctccacaatttctgtttttttgatatttcatacttttgttaccctcatttttctgtttttctgtagttgtctgtgtttccatttcactcgttgagtattattcaatttaggacattattaaaatctacctgttacataatttatggcatagtctgaaaacaattgtcttggttagagattttgggagtctatcaaacaggttcttatgatgtgtcttgtctgaatttagtttttactttctagttaaaggagtttattcatgtttctttatattcatcgcttgctacacctgttccctgcctgtggtactgcagtttctctgctgctgtaacatttacatttagtctcagcaaactcaaagggtcacttcaaagtatatgaccagttattttagcactttatgtcattggaaacagaaaccaagtgtctggaaaagcccctcaaagacagaaataaagatgtatgtgccagtattttacttgtcttttaaaaaagaattcaggagcttacaatttacttgtaaaggctctttgctatattggggagcagaaagagctgttttgggtagatgcaataaacttttctcttcattctatgaggctctttgtggcactgcacatacttaactcatttatacattttccacaaatgtattttggtctgtatgtttttgttacatttatgtctatgaagtaattatggcctatggtattttgctatgccatcttatgtagtttgtataattttatagcttagatttgtaaagtatatccatctgagtctagtaagatgaagtaatttgttatttctatttttttcagttgtgtgttctcattttgcccaagacctttggccagagcagggcataaaagattctttccaaaaagtaatactgagaagctatggaaaatatggacatgacaatttacaattaagaaaaggctgtgaaagtgtggatgagtgtaagatgcacaaaggaggttatgatgaacttaagcaatgtttgacaactaccccgagcaaaatatttcaatgtgataaatatgtaaaagtctttcataaattttcaagttcaaatagccagaagataagacatactggaaataattctttcaaatgtaaagaatgtggcaaatcattttgcatgctttcacacctaactaaacatgaaagaaatcatactagagtgaattgttacaaatgtgaagaatgtggcaaagcctttagtgtgccctcaaagcttaataatcataagagaattcatactggagagaaaccctacaaatgtgaagaatgtggcaaagcctttaatgtgtcctcaagccttaataatcataagagaattcatactggagagaaaccctacaaatgtgaagaatgtggcaaaacctttaatatgttctcaagccttaataatcataagagaattcacactggagagaaaccctacaaatgtaaagaatgtggcaaagcctttaatgtgttctcaagccttaataatcataagagaattcatactggagagaaaccctacaaatgtgaagaatgtggcaaagcctttaaccagccctcacaccttgctacacataagagaattcatactggagagaaactctacaaatgtgaagaatgtggcaaagcattcagccagtcctcacacattactacacataagagaattcacactggagagaaaccctacaaatgtgaagaatgtggcaaagcttttaaagtatctgtacaccttactacacataagagaattcatactggagagaaaccctacaaatgtgaagaatgtggcaaagcctttaaccaatcctcagcccttactacacataagataattcatactggagaaagaccttacaaatgtaaacaatgtggtaaaggttttagccaatcctcaacccttactaaacataagataattcatactaaagagaaaccctacaaatgtgaagaatgtggcaaagcttttaaccaatattcaacccttaataaacataagataattcatgctagagagaagccttacaaatgtgaagaatgtggcaaagcctttaacaagtcctcaattcttaacagacataagataattcatactaaagagaaatcacaaaccttaaagatgtgacaatgctttttatgaaatcccaaacttttttaaacataaaagaaatgctggtggccaggcacagtagcttacgcctgtaatcccagcactttgggaggccgaggcgggcagatcacctgaggtcaggagttcgagaccaacctaacatggtgaaacaacgtctctactaaaatacaaaaaaaattagccgggtgtagtggtgggcgcctgtaatcccagctagttgggaggctgaggcaggagaatcgcttgaacccgggaggtggaggttgcagtgatctgagatcacgccattgcactccagcctgggcaacaggacgagactctctcaaaaaaaacaaaaacaaaaaaaagtgctggtgagaactcatagaaatgtgaagaatatgagaaagcctttaaatggttgtctcacttgattgtaggtaagatactttatactggagaaaactcctacaagtgtgaagaatgtggcaaaacttttgactaatgctcacaccttggtgcacaggaaataatttatattttagacaacttgtacaagtataaagaatgtgacgaagccattaataactgctcacattttaacatcagagagctaatacaagcattaaaggtgcaattactgtcaaaagatcttccagaaaatataagcctttaaaatgtattaaatttattgctgtaaattcttatgtcttacagttcagaatctcttcatgcaaattctgtttttacttttctagtactcatactagacccataattttcttgattcttatttcgttttgttttataggttataaagtattcattatattagctggtcagtgattatagtaattgtttttatgaaatttagtagtgcacacaaaataattttcaaaggtaattccattagtgtattaagttttatttagtgttagaacattccattttgttcttttaagtgcagaaacttatataagcctacttttttttttttttaagatggagtttcactcttatcacccaggctggagtgcaatggtgcaatcttggctcgttgcagcctccacctcctgggttcaagtgattctcctccctcagcctcctgagtagctgggattacaggcatctgtcaccccgcctggctaatttttttatttttagtagagacagggtttcatcatgttggcaaggctggtctcgagctcctgacctcaaatgatctgcccacctcagcctcccaaagtgctgggattataggcatgagagaccgcacccagccaagccaacctttatttagttattttaaaaaaatttttaataattgacataaatacatttatttattgagtcaatttgtccaggtaagtactggggaagcttcataagttttgaggatatttttatacataaatatatcaaacatgagagtgcttgctgtataacagatgctccgtaatgcagaaatatttgtgttaaaattagtttgtaactttgattcggaaattaaaaataccattgggccaggtgcgatggctcacacctataatcccagcactttggaggttcgaggcgggcagataacaggatcaggagatcaagaccatcctggctaacacggtgaaaccccgtctccactaaaaatacaaaaaaattagccaggtgtggtagtggatgcctgtagtcccagctactcaggatgctgaggcaggagaatggtgtgaatccaggaggcagagcttgcagtaagcccatatggcgccactgcactccagcctgggtgacagagcgagactccgtctcaaagaaaaaaaaaaagaaaaaatattggctgggcatggtggctcatgcctgtaatcccaacactttgggaggccgaggtgggtagattgcctgaggtcaggagttcaagaccagcctggctaacatggtgaaaccccagcactacaaaaatacaaaaattagccaggcatgatggcaggtgcctgtaactccagctacttggaaggctgagacatgagaattgcttgaatgagggaggcagaggttgcagtgagccgagatcacgccattgcactccagcctgggcgacagagcgagacttttgtctcaaaaaaaaaaaaaatacaaacaaaataaaatatcaatgctgaagatataacattgatttttttcatgtggagatgacactttttttcaggcttcaaagctgaatcttgctgaatttaaagagaaattctgctgctttaatttcctaattatcttgattttttttcactttttatgtgtattctaactatgtatgcatcacagccctttttcttcttgctctgttatggctacagttttctctctgttatctccatgccatgtcatttcacatggtactttgtaggttctgaggagaaagttggtactttttaatgcattgaaaaattggttttaactagagagtttgcttatcaatataacttttagattaattaaaataaaagacatacactttccacaagaatgtatcagcatagaatatatcatatatcagtaagaagaatatatcagttagcatggttttgtttgtttataaaagaaaaaccttattagattctcacacaaagagtgaaaaatatagtgtgctaaaatatatatcttagaaattttatttttgagcaagttgactgcaagtgaacaatttcgaatttaattttataatatagcataacttatgtttctatacagtatcttcaacttttaagtgtgaatgttaaagttggcaaaataataaaatgatctctggatttgaaatttgatgtaatttttttttcatgttgctattacaatttggaggaatttctcactttttttcctagattgcagtttttactctttgtcacctaactgtagtcaactccctggtcattttctctggaaaacttttggagaacatggctgcttttggattaaaatatttcccattattttgcataaaaaacgagtttactgtgttcacagagtggctagtcatgggaccataagcaacagctccaacttttagtgtttttcatactgttaccatcaacaacagaaactccaggtaccccatgctcgaagtaaaagccctaacgtacattggctcttcccatacactctgctgggtccagaaaatgctgttaaatactagagtttctaagctgggcatggtggctcatgcctgtaatcccagcactttggaaggctgaagtgggtggatcacctgaggtcaggagtttgacaccagcctggccaacatggcaaaaccccatctttaccaaaaatagaaaaattaactgggtatggtggtgggcacctgtacttgggaggctgaggcagaagaatcccttgaatccgggaggcggaggttgcgttgagccaagatcgtgccattgtactccactctgtctctaaataaataaataaaataaataaatatcagagttcctatggtcatggctgacaaactaagtgacaaaaactaattttgatactattcagctgtttatgacaaagacagtatttgaaacattgttatatgtgtgtgtatatatatatacatatgtatataacatatatataatttttagacaagagtcctgctctgtcacccaggctgaagtgcagtggcatagtctcagcttactaaaacttccacatttcaggttcaagcaattctcaagcctcaacctctcgagtagctgggattacaggttggtggcaccatgcccagctactttttctatttttcatagagatggggtttcttcatgttggccaggctggtcttgaactcttgatctcaagcgattcacccaccttggcctcccaaattgctggaattacaggtgtgagccactgcacccatttaattatatatatattatatatatgtaatataatatatatattatatatatgtaatataatatatatattatatatatgtaatataatatatatgtaatataatatatatattatatatatgtaatataatatatatattatatatatgtaatataatatatatattatatatatgtaatataatatatatattatatatgtaatataatatataatatatgtaatataatatatattatatatgtaatataatatatattatatatgtaatataatatatattatatatgtaatataatatattatatatatattatatttatatatatatatatatattttttttttcgagatgatttcaatctgtcccccaggctggagtgcagtgcagcctccacctcctaggtttaagtgattctcctgcctcagtcttctgagtagctgggactacaggcagacaccaccactccttgctaattttttgtatttttggtaaagacagtttcaccctgttagccaggctgctcttgaactcctgacctcaagtgatctgcccactttggcctctcaaagcactgggattacaggcatgagtcaccatgccaagctaaaaatatatttttccagttgacagataaaatgtgtattctgcaatacaatatttttaagtacatatacattgtcacatgcttaattctaggtaattaatgctttacctcatgtagttaacatttttgttgtgagaccacatagcattgtcttaacatttttcaaaactagaaatacattataatgaactatagtcactgtgctgtaaaataaatcttctggacttattcctcctattcaagtataattatatattttctttccaactccccatttcttctaaacacgttggcatctggtattcaccattttattctctacagcaatgagattgttttttagaattcttgtgtaagtgaggctgggcattgtgtctcacgcttgtaatcccagcacactgggaagccgaggcaggtgaatcacttgaggacaggagtttgacaccagcctggccaaagtggtgaaaccctgtctctactaaaaatacaaaaaaattagccaggcatggtggtgggcgcctataatcccagctacttgggaggctgaggcaggagaattgcttgaacccagcaggtggaggttgcagtgagctgagatcacaccattgcaatccagcctgggaaacgagcaaaactctgtcttaaaaaaaaaaaagaattaatctgtaagtgatatcataagatagtattcattctgtgcctggcttatttaatataatgttctccaggttaatccatgtcactgaaagtaatagaattttcttttttaaaagatgaatagtattcaattgtgtatgcctaccacattatttttatttactcattagatgtcaaactgttgactctattttggctattgtgaggagtgctacaaacaacatagaagtgcaaatgtttcttcatcctgattttatttgttgtggatatatgtccagtattgaaattcttgtattatatgatagttttgatcttattttttttgtgagatctcttttgtttttcataatggctgtcctcatttacatgaaaaccaacagtgtgcaagcatccccttttcttcacttctatgccaacactttatttttatttttatttttttgagacggagtctcgcacttgttgcccaggctggagtgcaatggcacaatcttggctcaccgcaagctctgcctcccaggttcaagtgattgtcctgcctcagcctcccgagtagctgggattacaggcatgtgccaccacgcctggctaattttgtatttttagtagagacagggtttctccatgttggtcaggctggtcttgaactcctgaccttaggtgatccacccgcctcggcctcccaaagtgttgggactacaggcatgagccactgtgcttggtcacttttatttttaataaaaatcattttaacagtagtgagctgataccttgtagtttttttttttttttggcatgcctttctctgataacaattgacattgagcattttttaatatatttgttggacatgtatatgtcttgaaatatatttaaggtttttgctcatttttagtagttatttgttttcgttgtatagttatttgaggttttttttttttttttttttttttttttttttttttgagacagcgtttctctctgtatcctaggctggagtgcagtgatgcgatcatggctcactgcaccctggacctcccaggttcaagtgatcctcacacctcagcctcttaaatagctgggactacatgcatacaccaccagcctggctaattttttttattactttttgtagagacaggggtctcactgtgctgcccaggctggccttgaactcctgggctcaagcagttctcccaccagggccttccaaagtgctgggattacaggtgtgagtcactgtgcccagccgagaatgcttttttttttttttttttttgagacggagtcttgctctctcgcccaggctggagtgcagtggcgcgatcttggctcagtgcaagctcctcctcccgggttcacgccattctcctgcctcagcctcccgcgtagctgggactacaggcgcccgccaccacgcccggctaattttttatatttttagtagagacggggtttcaccgtgttagccaggatggtctcgatctcctgacctcgtgatccacccgcctcggcctcccaaactgctgggattacaggcgtgagccaccgcacccggcccccctttttttttttttttttgagttggagtcttgctctgttgccaggctggagtgcagtggcgcgatctcggcttactgcaacctctgacaccctagttcaagcgattctcctgcctcagcctcccaagtagctgggattacaggcacgcaccaccatgcccagctaatttttgtatatttagtagagacggtttcgccatgtcctcggcctcggcctcagcctctcaaagtgctgggattataggcatgagccactgtgcccggtcttgagtttcttatatattttttatattaagctcttgtcgtgtatgatttgcaaatattttgtctgttttttagttgtttcattctgttttaccagattctgtgcagcagctttttaattaaaagtaatctgagtaatcaatttttcctttggttatctgggattttgatgttaaataaaaaaattcactgcccaaatcaatgttattatgctttcactctatattttttgtactaattttagagtttcaggccttacatttaagaacctaatttattttgagttgatttttatatatggtgtgagattagggtctcattgctctgtatgtgggtgtaaagtttccttaaccatttattgaaaatactgttctttccctaagaaattgtcacccttacatttgtgtaaaatgtgtttcgtttcttcctttaatgttctttagattataatgtacaggtctttcaactttttggttaaatgtatttcaaagtatagttactagattatttgtagatgggattgtttttaaatttcattttgatatatttattactgtatagaaatgctactgaattttagatattgcttttgtattctgtgagtttaatgaatttgtttattataatagcttttggtaaagtcttaggcttttctatacttaagattatgtatagaaataaaaggttattaaacagggataatttaacttactttttccaatttggatgcctttggttttattcccttctctgttatatttagtaagactaaaaaaagtgcacattcttgccttgttctagctcttagaataaaatcttaaactttttttgtttatttagtatgttgttagctgtgcatttttttgttacatatagcatttatcagcttgaggtgcaatgctgctatacctaattttttcagagatgtattatgagggactgttgaattttgtcaaacttttattctgcatctgttagtagagttgtgaaatcacaactaattctacataaataccaaacattctcagagacttgtacgaacatctctgtgcattcaaagtacaaaatttagagaaaatagataaactgaatacatacaacttccaagtttgaatcaggaataaacagaagtcttgagagcaaaaatgcataaaattgtataatgaattagtaattaaaagaaaccctaccaaccacaaaaagccctggatcagatgaatctgcagaaaattttaccacgtatgcaaagatgagctggtcctaatcatactgattgtattccaaaaaaaatcatggtgggattccaccctaacttattacataaaattagtatcatgttgctctcaaaatctagtgaagacagaacaacaaaaacaactacaggcctatattcctggtgaacatagaaacaaaaatcctccatgaaatactaggaagctgagttcataagcaaataaagttactttgccacagtcatatgagctttattctatgaatgcaataatgtttcataatatgcaagtcaataagtgtaattcaccatgtgaaggtaattttaagcaaaaaagtatatatcacaatatatgcagaaatagcattcaagaaaattaaatattgactgatgaacatattcgcaaaaaaccaggcattcaagaaacatacctcaaaataataagaggcatctatgacaaatcctcagccaacatcataccgaacaggaaaaagctggacgcattctctctaaaaataaaaataatacaagaatattcactctaaaccgtcctattcaacatgattctggaagtcctagcaagagcaattcaaaaaagaaagaaaaggaatccaaattttctgcactgatgatataattctttttctagaacctttaagattagaccagaagacccctctgcctaataaaagactaaagcaaagtcttaggatacaaaattaatatacagaaatgagtagcatttctgtacaccagtaacattcaagctgagaaaaaaaaatcaagaagagttccatttacagtagccacaaagaaaaaacaatatacatagaaatgcattaaagaagtaaaatatctctacaaggagaacgtaaaacactgctgaaaaaaacagagacaaagcaaataaatggaaaagcatttcatgctcatgaatttgaagaatcaacacttaaaatgttcatgctgcataaagcaagctacagattaagtcctttttctatcaaactatcaatgactttttttaaatagaattaagaaaagaaggctgcatgcagtggctcacgcctgtaatcccagcactttgggaggctgaggttggcggatcacttgaggtaggaatttgagaccagcctggccaacatggtgaaaccctatctctaagagttacaaaaaaaaaaaaaaaaaaaaaaaagacaggtatggtggtgcatgcctgtaatcctagctactcgggaggctgatgggaggattacttgaacccgggagacagaggttgcaataagctgagaatgccactgcacactccagactggatgacagagtgagactccttctaaaaaaaaaaattaaaatatatatggaagaataaaagaattcaaatagtcaaagcaactttagataaaaaggacaaacctggagaccttacattacttatctttaaactgtactataagctacagtaatcagtataacatggttctggtacaaaaatatacatatagagcaatggaaaaaaatgagagagccctgaaataaagctacactactccaacttattattgaaaaagtgtacagaaataaaggaaaaataacttcctatgcaataaatggtagtgggaaaactggctagtcatatgcagaagaaaattgaatccctacctcatatcataagaaatataacaagatagattaataactgtgagtcttcaagctacaaaaatcctagaagaacatctagaaagtacatttctagacactggcctctagaaataatttatgactaacaccttaaaagtgaatgcaacaaaaataaaaattttaaaatggcacctaagtaaactaaggagcttttgcacagtaaaaagctatcaacaaagtaaacatagagcctacagtgtggaataaattatttgtatactgcataccacaaaggattaatacatggaatctataagatttaataagaaagtagacaagtgatgtaaatacttctcaaaggaagacataaaagctgccaataaacatgcagaaaattgcacaagatctctaatcagagagacggaaaattttggagagaagaaaatctttataaactgttggtgaaaatgcaaattcagcccctgtgaaagtttctacatttttcaaataactaaagatagaattgccatttgacccattaaccccttttttgggtatctacccgaaggaaaatattttactaaaatgacacctgtacttacatgttgattgcagcactatttacagtggcaaaaaccttgaaaaactatagggtatgatgtacactatgtgggcaatggaattattaaatgtgcaagcctcaacatcctgatgtatacaggttacaaatctgcacatgtaccacttgaatctaagataaaaataataaaatgttttgtggtataatggcatgttacatttctccagttctgaattagtagttggaattaggggtgagagaattatttgccccttagggcataagggtaaatgtttttataccaggtctccccacactctataagctagcctctctgaaagctcttgggctatatagctcaagaagtgttttattcccaagtatgcagataaaataaaagaccctacatctttattttttatgtatcaactgtacattagactatagagttaatttgttagtctactcttttgggggaaaaatggtaagtggtttaatcacattaaaaatttttttagaaaatgtgaggttgtgaaaatcatggttaattccttaattaggaaaataaaacatttttctaaaaaaatgcataaaagtctaatgtccatagcctaagaacaatgaaacagagactgtggtttatttaagaccacactgctgcaaatgcttattccatcacaagaaatagaaacaatgggtcagaaggtgttttcagagtacttttcttaatctattgcagtgtttaaagtttggtctttattatctcctatataagtctgtacttaaaaagccatgaattttatgttaatatgctcacacaaatatttttcctagaaaagtactagtgtgtttgcaatgaatgtgtagcatttctggcctaccttgtgctgctgtgtttgtgtgaaattagaagacaggaaataaagcagagttgaccatgacatttctagtttctacaaccacaccatctgaaatgtagtgttatgtcaacaataaataatgacagtatttcaaaatatagaaacaaattgatactttatatatttagttttttatagtttataaaaatttgtagtttctgaattattataaattaaacaacttgaacatgaagatacctaaaagttttatctaaatgatagtattaaaattgtaatagcttatgattgtgagtcacaattgccctattgggtttactggaaagtagttatttatcttctaatagtagatagagaataggtttttataatcctaaggatacagattttttttttgagacaaagtttcattcttgttacccaagttggagtgcaatgaaacaaatcttggctcactgcaacctctacctggcagcttcaagcgattctcctacctcagcctcccaagcagctgggattacaggcatgtgccaccacacccagataatttttgtatttttactagagacagggtttcaccatgttggccaggctggtctcaaactcctgacctcaggtgatctgcccaccttggcctcccaaagtgctgggatgacaggtgtgagccaccgtgcccagcccagatcttttaaaattagtactgcttagatttgtacaaaattcataggcttgcagtagcagaaattttaatatttttttctaatagaagagaaaaagtggctgggcatgatggctcacacctgtaattccagcactttgggaggccgaggcaggtggatcccctgaggtcaggagttcgagaccagcctgactaacatggtgaaaccctgtctctactaacaatacaaaaattagccggatgtagtggcgggtgcctgtaatcccagctacttaggaggctgaggcaggagaatcgctggaacccaggaggcggaggttgcagtgagccgagattgtgccattgcactccagcctgggtgaaagagcaagactcagtctcaaaaaagaaaaagaaacaaaaaatcaataaaattaattttttaaaataagtttaaaagaaacttcatatttgttcatttttttttttttttattgatcattcttgggtgtttctcgcagagagggatttggcagggtcataggacaatagtggagggaaggtcagcagacaaacaagtgaacaaaggtctctggttttcctaggcagagtgtttgtgtccctgggtacttgagattagggagtggtgatgactctcaagaagcatgctgccttcaagcatctgtttaacaaagcacatcttgcaccgcccttaatccatttaaccctgagtggacacagcacatgtttcagagagcacagggttgggggtaaggtcatagatcaacaggatctcaaggcagaagaatttttcttagtacagaacaaaatgaaaagtctcccacgtctactactttctacacagacacagcaaccatccgatttctcaatcttttccccaccttgcccccttttctattccacaaaaccgccattgtcatcatggcccgttctcaatgagctgttgggtacacctcccagacggggtggtggccgggcagaggggctcctcactgcccagtaggggcagccgggcagaggcgccgcccctcacctcccggacggggcggctggccgggcggggggctgacctccccacctccctcccggatggggcggctggccgggcggggggctgaccccccacctccctcccgggggcagctggcctggcaggggctgacccccccacctccctcccaggcggggtggctgccgggcggagacgctcctcacttcccagatggggtggcagccaggcagaggggatcctcacttctcagatggggcagttgccgggcggaggggctcctcacttctcagacggggcggccgggcagagacgatcctcacctcccagatggggtcacggccgggccgaggcgctcctcacatcccagacggggcggcggggcagaggcgctccccacatctcagacgatgggcggccgggcagagacgctcctcactttccagatgggatggcggccgggcagagacgctcctcactttccagactgggcagccaggcagaggggctcctcacatcccagacgatgggcggccaggcagagacgctcctcacttcccagacggggtggcggccgggcagaggctgcaatctccgcactttggggggccaaggcaggcagctgggaggtggaggttgtagccagccgagatcacgccactgcactccagcctgggcaccattgagcactgagttaacgagactccatctgcaatcccggcacctcgggaggccgaggctggcggatcactcgcggttaggagctggagaccagcccggccaacacagcgaaaccccgtctccaccaaaaaaatacgaaaaccagtcaggcgtggcagcgcgcgcctgcaatcgcaggcactgggcaggctgaggcaggagaatcaggcagggaggttgcagtgagccgagatggcagcagcacagtccagctttggctcggcatgagagggagaccgtggaaaggggagaagaggagagaggagagaggggagagaggggacaggggacaggggagaggggagaggggagaggggagaaggccacatttgttcattaaataagatttaaaaccacattttaagtgactgatcagtaattccaatctatttcattttagtcactgaaaaaaccctaatatcctttaattattcaaaaaatattcaaaaaaagtattcttatatttgtgtttctgaaactttcagaaactgtggaccacttaatggatgatgacgtacatggagacaacaaattttctatatgataataggctcatcctagcttttatttttatttttttaaaaattttttgagacagagttttgcttttattgcccaggctggagtgcaatggcgcgatcttggctcactgcaaactccacctcccgggtacaggcaattcttctgcctcagcctcctgagtagctgggattacaggcatgtgccaccatgcctggctaatttgtatttttagtagagatgaggtttctccatgttggtcaggctggtcttgaactcccgaccttaggtgatctgctcaccttggcctcccaatgtgttgggattacaggcgtgggccacctcacctggcctcatcctagcttttaatttaaaaattcaaattatttcaaaagtaaaattaatggcttttttaagtcatgagagggatagatatcattgttagaatccatttaccaaagtgtctatcttaggcttcgtaatgagtactttaaaccaaaaatcaagttctacatactatctaagtgtaaaaagaagtggtttgtaaattcctctttatttctactaagttagaaaattcaaagccaaaatgttaagttaggaataaaaacaagcattggataagagtgtgttgggtataatgattaagagtcaaactcgacatcaagtggttcctgattgcatctcagttctgctatttatgggctgtacgacctgaatgcagtttcttcaccgctatgtgcttgattcttcagctgtacagtgagaataatggtgcctaaatcctaaggttttgttaaaattagagcaagtgatacaaataatgtcccagaagagcatccaacgtatagcaagtgtacagaaattttagctcttatttgtcaattctgttagattgtgatcaatgttaagcctaaaaaccaggtgaccacatcagtggactgtaacttatgttcattctactcagtcagtctgaggctatatagtagtcgaatgtttctaatactatccttggcaaattcttatatattcacatatgtgtgtgtatgtgtttcctgaaaattttaagatgaacaagcactttcttctctggccgaatttcttaaagcttttttctctctttggttttaaaaaagtgttaatatttttggttggcaaatcagagttgtatacatttatggggaacaatatgaagttttatatatgtatataatatggaatcaaaaagtcaagttaaataacatatcaactcaactatcatttttgtgatgagatatttgaaatttagtcattttgaaatatacaatacattatagtttactatagtcacactgctgtacaatagatctcaaaagctatttaacctgtctatttgaaactttgtgccctttgatcaactccctctttccttccttcctttctttctctttctttctttcttttcttttcttctttccttctttcttttttattcctttcttttctttttttttttttttgagatggattcttgctctgttgcccaggctggagtgcattggtgcaatctcagctcactgcaacctccctcttccatattcaactgattatcctgccccagcctcccagatagctgggattataagcatgcaccaccaagcctggccaacgactccctattttcttcccaccacaccactggaacaactggtaaccgttgttccactttctacttttgtgagttaaaatttattagattctacatataaatgaggtcatgcagtattattctttctgtatcaggtttcttccatctagcataatgtcttctgaatttatctatatgtttttgaagaataggattttcctctttttttttttttttttttgagtcaaagtttcactttgtcacccaggctggagtgcagtggcatggtcttggctcactgcaacctccgcctcctgggttcaaacaattcccctgccttggcgtcccaagtagctgggatttacaggtgcccaccaccatgcccggctaattttttgtattttttgtagagacggcgtttcaccatgttggccgggctggtcttaaactcctgacctcatgatccgcctgcctcggcctcccgaagtgctagaattacaggcatgagccaccacacctggccaggattttcctatctttaaggctggatagtattccattgtgtatccatgtcaaattttttaaaaaattaatttaaatatatatttattattggttgaaaaacttgtgttatgaaaggatatttctgtgttaagcatgtattaatgtaattcagcactaaatattaataatagctggtttgtactgagcactaaccataacactatatccatattaatgagttaaattctcccagtaacttaataccacaggtattataattattctcattttacagaggaaccaaaagagccactgagaaaaacaacttgctgacaatagcccaggctggagtttagtggtttgatcttgggtcactgcaacctctacctcccgggttcaaactattctcatgcctcagcctcccaaatatctggtattacagacgtggaacaccatgcctggctaatttttgtatttttagtagaaatggagtttttacatttttgccaggctggtcacaaactcctgactttatgtgatcctcccaccttggcctcccaaattgctgagattacaggcgcgagccaccatgcccagcctaatatgaatgtttcttgaatccagaaaagttatgcaggtagtttcttgtaggttaacataaaagaacaattagcaaaaacatatgaaatggggtaaaattaatcaaaaccacatctttccaataagcggtaataattgctgtgcttttttaaatggctagattactaacaatatgcaaacacaagactttggctttgctcaattattaagtttttgaacattttgatatctgaaatcttggctaaagttctttttttttttttttttttttttttgagatggagtttcgctcttgttgcccaggctggagtacaatggtgcgatcttggctcaccgcaacctctgcctcctgggttcaagcgattctcctgcctcagcctcctgagtagctgggattacaagcatgtgccactatgcctggctaattttttgtatttttagtagagatggagtttctccatgttggtcaggcttgtctcgaactctcaacctcaggtgatccgcccgcctcggcctcccaaactgctgggattacaggcgtgagccactgcgcctggccaaagattttaaaaagaatatttttgaggtggctttttagggtttccatggtaatacaagaagaattttaataggcaggaaaatgcattctacatacacacattgcacttctctgatttgctttaacattgaaagattaaagattgcaaatctagtttctcagtttagagtaaattaacaaaagatttatttttcagctggcaaataattgtataaaactaatggataatagatgccattagctgtcaaaaaatagcatgactagattcagtaagtatctagccatgcaaatgacaatccaataaaattaaaaccctaattggttcatgtggaaagcattgatgtgcagtgtcgtgcacctccactcagcacctccttgggcctgtttacagagataccaatttctccttcgtgactaagggtgaatactggaaacagagtgctgtgttcagagttattactgggaacatggttaacacatttctttcatattataaagacattttatgaatgttactctgcatcacaaaaccttttagtaaaagattgtttatttaagtacttaatttggatttataaaaaatgtcaatattctgggtaagtcacaaacacttaaatctcaatcaaattttataaaacatatttgaataagataaagttttcttagacaagaattgtattttattactaaatttagagacaaatagaaaaccagtactttgggccaaataacagtgtttggcacagaagtactcccaaacaagtgctctccatcatcaccgttaaagtagcaatggcaccacgtgctttcctgaaaccagctggactgttttccactgataaaaagtggagaggacattgaaataatgaaggaagctgatataaatggaatacttatataaaataaaagtaaatacaagtgaaatacttatatgaaatacttttaaaataaaaagtagcatttgatgtttatgactgtagatgaaactgttagtatgagatcctcatatttttacttctcttgacaggataacttgattcacaatgttcttatttcaaataatattttttctgctagatatttgcaagctttcagtcacatagtacctgagctcaacagaaatcaacaaaagaaatattttaccacaagcattttattattgatgcacatgcttattttacttaaaatacattagcttttggtgaaagattatacttttttttcagtgtgttttttattgtccttccaggaaactgctattctcagctctacctgcattgactaatagtgagtaaaagttatgtttgggtaagaagcaaatgtgtcttgtctgcatctcttttttcatttgttggctgaagaaagtataatgcagatagaagattaaagaaaataaaatccctgaaagattatttagaagtcctcttaaccggaaaaaaaaaaagccctcaaggaattgtgatataagtagaaaatatattatcttgctaagcctctaaaatttcagcataaaaggccaggcgcagtggctcacacctgtaatcctagcactttgggaggctgaggtgggtgaatcacgaggtcaggagatcaagaccatcctggctaacacggtgaaaccccgtctctactaaaaatataaaaagttagtcaggtgtggtggcgggcgcctgtagtcccagctactcgggaggctgaggcaagagaatggcgtgaacctgggaggcagaggttgcagtgagcagagatctctccactgcactccagcctgggtgacacagcaagactccgtctcaaaaaaaaaaaaatttcagtgtaaaacctgtattgctttaacaaatatattattccttcagtttttatttttcagaatatgattcaatttcttggtgaatcaaaactgagaggagaataacttatttgttaaggtaaaaaatgtagggaatactcactgcttatggccaacatcttctccacccccaggcccaggcaatcatcattctatgctctgctgttattgatacaggagcacaaaagaaattatttaggcaaattgtgaggataagagagcccttggcaaagcttcccttttaacaagaagcagcccccaactgactttttttcaacaaagagtagcctgtaaaatccagctgcaaatatagataagcaagctagaagcttgcatgggtgaatgtcagcagctgtgccaatgggaaaaggctacctgaggccaagcattttcaacatggaggcaccatattcccttttttgtgaatcacgtgtataaaggaacaggaaacatggcactggccaggtaaaacacccatctgtatagtagaaaattaaagtggggtggccagcttcttcatgcactatgtaaatggtacaccttgtctgaccaatcttttgggccctatgtatatgaaacatcacctcctcaagctcatctgtaaaactccatgcatttcaccacagaactggaagacctgctcgagagcccctctctctctgaaggagacagaggttttatttttcttttgcctattaaacctctgctcttaaactcactcctcatgtgtttgcattcttaattttattgctgtgaggcaatgaacctcaggtattaccccaggtgaatgacactgcttcattgtgggggcttgtccaggattataggaagggtaagtataaaagcaaatgctggccaggtgcactggctcacacctgtaatttcagcactttaggaggccgaggtgggcggatctcctgaggtcaggagtttgagactagcctggccaacatggtgaaaccctgtctctactaaaaatactaaatagccaagcgtggtggtgcatgcctgtaatcctagctacctaggaggctgaggcaggagaattgcttgaacccaggaggcggaggttgcagtgagccaagatcacaccattgcactccagcctgggcgacagagcaagactctatctaaaagcaaaacaaaacacaacaaaaaaaaaacaaaaaaaaccagaccccaactctgtccttttattttgaggctctcacactccattttaaaatcaaataaaaccagaaataccaggtgtcctatggccagctgtacctttagggtgagctgccattctcaagtctcacatgacagacttgctggggagaacataatgaattccccagtgccctcaggttgctgcgaatgttggctatttttcaaactgcttttcatttatggaggacctagccatcacatggggctggaagaggtcctaaagtaattgaggatttcttttctgggccacaccctggttttacctgaaggcgtctggaccgatcccagcctctgactgctcgactggatgttggcaacaggatttccaagctttccctatcacaatttttctccctttcctatctgtgaccaccatgtcttctagcctcttttcgtacgtaatgccgcaggaatttttacagttcaaggaagtaatcctgttaggcaagatcagaaaataccaatagtaactggaaatatagctcacagggttgctggttttgtgaattttttaggagcagagcgtcccaccacagtcaaaaccactgtctttctctccaccttgggccacttcaagggaaaggaaggagactaaaagggtgcctttctctcacttttctttctaggtgggtaacaagccatctttggtctgcactcctcttgagtgcattcagaagcattggcactcctgtaaccccatgagtttggggaaaaaaaaagtggcttattgcacaagggcctgacatttttactagacctttgcaagcactgcaaaatcaacccagctattagcagtcatatcaagcaggtctataggaatgattctccaaaattagagaagcaacttccaggagaaccatctgagggatcccccttattcaggatccactcaagttcccatgtcatgacagaaccttagtcaaaaaagaaaatagtgaatgaaaaaataggagaaacattattctcaattgaaagagagacagtacctcttgagaatcctgattggaaccccaatgatgccacagataaatggaaaatcaaacactttttaatgtgcgtattgaagggcctatggagaactaaggccaatcctcttagttactctaaactgtccatgatagaccagaagctagataagaatcctgcagcctttatgaaaaggctgagagaggctctaataaaacacacctccttatcccctgattcagttaagggacagctaatcctaaagaacaagtttattacaccggcacctcctgatattagaagaaaactgcagaagcaggatataggagcagacagcaccttggagaacctcctgagggtggccaacttagtcttttataatagagaccagaaggaggccccctaaaaagaaagagagcacaaaagaaggacaaacctttagtagctgctttgcatgcttgcaaagtccaggatcccgaaggtgccttcactaattgctacccacgtggcaagccagggcactttgagaaggggtgcccaggcaccaagaggaatccacctcaaccctgtcgagcctgtggcatggtccactggaatcaaactgcccccagaggtggaggtcatcagcttcagaaccagtctcacagatggtccagaaggacttatgggtcctggggctcaaactcctggctccagtggctcaaactgccattacagcacaggatccccaggtgattctgaaaattgaaagaaggaaggtagacctccttcaggaaactggagtcagcctctctcttcttctctctattcttctacccttttcccatagcatgactatgagagacatctcaggaaaaactctaatccaatatttttctcaaccctttagttgcagttaaaaggacctattatttacacatggcttttaaatcatgcctgaaagttacactcctttattaggtagagacattctatctcacatggggaccagcatccttataggcccaggacaaattctttgtctctatctggtagaagataatattaatccagaagtgtgggcaattcaaaggagaataggtcaagctgtaaacatgaggccagtctggatccaacttaaggattccactttctttttttctttttatttctttttttttgatagagttttcactcttgttgcccaggctggagtgcaatggtgcgatctgggctcactgcaacctccgcctctggggttcaagcaattctcctgcctcagcctcccacccaagtagctgggattataggcaggcactgccatgcttgtgtaattttttttttttttttttttttaagtagagacagggtttcaccatgttggccaggctggtttcaaactcctgacctcaagtgatctgctcacctcagtcttccaaagtgctgggattacaggtgtaagccacctcgactggtggattccactttcttttctaatcagaaaaaatatctcctaaagccaaaggataaaaaagggctagaagccattattagtaacctaaaaatctaggccctcctcaaaccctgtaacaccccaatattaggagtgcaaaaatccaatgtgaaatgaaaaacatcaaaaaattaacaggttattatcctcagttttccttccacaaaacatagcagaaatgcactctaaggaatataaaaagaaaacaggaagtagccgaaggaaatagtttagctgatcaggcagttaaatcgcagaaaggaagcttcagggcatcaatacacttcatacccctctaatttggtaaggctctaaaagaaatttggaggcctaatttggttaggcctcagtactctcctgcagagataaaatgggtcattactcaagggtacactttccagccctcagaatagctacagtcaaaggatggcaaactccacttgccagcctccagccaatggaaagtccttaaaaagcttcaccaagcttttcacttgggaaaggataaaacttttcaatatgcccagagattgttttcaggagagaacttattcaaaacagtcaaacaggttgttaaggcttatgaagtctaccttaaagataatctcctcaacaagacagcttcttcctctttgaacccaaagggtgggaagctatgcaagggagatctggcagacaaacttcacccacatgtcaaaaccaaagggcatccaacgccttctggtatgggtggatactttaagggtctttcttttcatgggctatgtaattggcacacttagtcaaaccaatcccctgtaaatcaatcatcacctatgtaaatcaatcactgcctcctcaagccactgtaaaaaatcaatcatgttctgctgcaaatcaaagaccctctcttgggcaacgcacattctcagaatgaggaagcttttcttctctctcttctttctattaaactttctgcttctaaacccactgcttgtgtgtgtttgtgtcccgaattctttttcagtgcaagacaaagaaccatgggtagatgcccagacaacaaagacatttcatttgggggttctcatctgggatcaggatcagaacagaagatagaaacatcagattggtgagtatggagtgaacctcaaatctgtcttttaatctcaaggcttccttcaaaccagttttattcgcagaggtcctaaccatcatgtgaggctgggagaagtctgatgcaactgaggattactgtccagggcacaccgtggcattattcaaaggcttctggactgaacccagcctctgacagcctgtctgagtgttggtaaaggatcttcagctatcctgtcataaaattttcctttctttctatctggtgtcactatgtgtcctattctctctgtgtgtgcaatgtgcaggaagttttacagttcagagaaacacttctgttaggaaagattggcaaacgcctcaggcagtaactcaataagcatctctaacgttcctctagtgagcacatggtatttctaagccaacagtgccacctagtgaaaaatagaaattctcttcgtgagacacattgtcagtcctttaccataacactgcagtttcctattttttgtgctgctagaaaagccccttctgtgaatgggagagctctgccttcaacaattaggagtaaaacattctccatagccaaattttagttctgatactgtcccattagcaggaaaaatcatcgttaggtccctaccttcatttaaggcacctagtctgtctccaattagaacagtacttaattagtaaggagaattttaagtttataagttaagcagaaacacttttctaagggtgaatgttttatcatgagccataatagcaggcaatctagcaattttttttgttaaagaaaccttgcccaaaggccgactattacagtctctgtgaagattcattttttggggagccaggaagatcacacaagtttagaaagtaaaaggggatcacaggtggataagctagggttgcattgctaaagtatggttaatcccatcacttagttcatctggttccatggtttggaaagacacacctacaaccatgggcagcacatttaacacgatgctgggacccaggaaacaagaaaagagaatggttggggagacactcacactgtcttcccctccaacctgggtcacaatgaaagcaggaaaactaaaacgatgtttttatcctcactttttctagatgagcaacagaccatcttcagcttgcacccctctggagtgcactgtgaaacactagaacttctttaacctcaggactttgaagagaaaagcaattcattttcttttgcactagggcatggcatttttactgaacctttgcaagccttgtaaaatcaaccccgctattttaacaggcatatcaggcaggactatagagaacaatcctccagaattagaaaagcaacttccaggggaaccatctgagaactccccttatttggggccacctcaagttctcttcttattacgagaccctagggaagtaaaggaagacttaggccaattttctgacaactccaatacgtttatagaaggttttcagaatttaactcaagtgtatcacctcacatgaaaggatgttatgctgcttctaaaccaaaccccaaccacagctgaaaagcaggcagttctgcaggcagcagagattttcagaaatgagcaacaaatctcctataatacatcaaaagggaagaaaggagatagggaatgtgaagaaatagcagaaacaccatttcaaataggaagtgaagcagttcctcttgacaaccctgactggaactccagtagctctgcgggtgaatggaaaaggagacactttttaatatgcattttagaaggtctggaaagaactaaggccaaatttcttaattgttctaaactgtctatggtagaccaaaagccagatgagaatcctgcagcatttatggaaaggctgagagaggcactaatagagcaaacctccttatccccagattcggtcgagaaacagctcattctaaaggacaagtttgttacacagtcagcttccaatattagaagaaaactacagaagcaagctataggaccaattagcaccttaaagaacctcctgaaggtggccactttggtcttttataatagaaaccaagaggaggaccctgtagtcccagctactcaggaggctgagacaggagaatctcttgaacctgggaggcggaggttgcagtgagctgagattgcaccactgcactccagcctgggccacagagcgagattccatctcaaaaaaaaaaaaatttgtgaattcaatttttttggtattcttggtatgtttttgtggtgattcttgatgcagaagtttataatgtgagtatctacatgctattctgtctatcaaagtgggagctgcaagttagtcttgccttctagtcaccactttccgtctctctcaaaggtggtcttttaacttagctactgtttcttagctataatttctgagttcgaggtggagcccattaagaaatattctatatgcctggactcagtatggataaatctttaaaagggcaagcctactttacctaagcgtctacttctacaaataacttatttaagatatatatatatatatatatttttttttaccttcaaggtgggataatgactaagaaaaaggttggcagattgatttaatttttagtaagcatttagtcttttatttaccttttacgaagattatcttttaaaaaacaataaatatattaaaaatatattaaaaatattaaaatctttttagaagctgctgcacatcagcagtcaagcctagatgaggctaactagggagacttccttttcaaatgcatgtgctaaagtgcagtgttgtttatttggaataccccattgtaattttaaattatctttagtaaaattttcccatttctgtgtttgctgctacaagggcctaatacatatgcatgtaaatgtaggcatacctggaagataaattactcagttcttaaaaaattaagcgttccattcttatcttgaaactttctttggctgatatcattctgataaacttagccaatgattcttttctgcctaaaaaaacacaagaataagaaaccaaggggataaaacacaacaatatctgccaatttacagatgtcaaagtttacactccttgcattattgccatttactaccgatttctacctgacccagcgagatgtcatagacctctaactgaatccaagccagttaattatcagatccaacctgatcctggatccagtccagtttctgtcctgtcttcttaatccaatttgaattctaaattcgctaaaactcagagagttcaaaacacaaatccatgacactttggaatccaagaaagaacttaccatgccccctagttgctgcaagacagcaacgaacacaataagccattgtttggtcacttggtgttcctgggggttgctagaggctacttcagattttgcttctagttcaatctgttaaaaaagccttaaacagaatatatatatatatttgagatggagtttcattcttgtcctccaggctgtagtgcaatgatgcattcttggctcactgcaaccttcgcttctcgggttcaagcaattctcctacctcagtctcccaagtagctgggattacaggcacccaccaccacgcctggctatttgtgtgtgtttgtgtatttttagtagacacagggtttcaccatgttggccaggctggtctcgaactgttgacctcaggtgatccacccgccttggcctcccaaagtgctgtgattacaggcgtgagctaccgtgcccagccaaacaaaataaatttaacagagtttaatcaagcaaaaaattattcactaatttgcagtctggtgagccagagtaggctcagagaaattcccaagcagtcacactgttggaggcatttaaactagaacaatttcactatgaataggggatggataaaataacgctgagacctgttgggctgcattcagaaaaagttaggcattcttagtcgtaggatgagataggagttcaataggattggtatcacaaaatacaggttataaagacccaattgataaaacagaatgcaataaaaaagccagacaaaatccataaaattcaagatggtaatgaaagtgacctgtggtcatcctccttgctgattatacattgattgtaatgcattagcatgttagaagaaactcccactggtgccatgatagtttacaaatgccatggaaatgtccagaagttaaactacatagtctaaaagggggaagaactgtcagttctggaaattgctcactccagtcatggaaaattcataaatatttcaccccttgtttagcatataatcaataaataactataagtatactcaatcaagcagcccatgccatttttctatctataggtagccattcttttacttcttcactttctcaataaacttgcttttactttatagactcaccctaaattctttttgtttgtttgtttgttttttagatggagtcttgctctgtcacccaggctggagtgcagtggcacgatctcggctcactacaacctctgcctcccgggttcaagtgattctcctgcctcagcctcctgagtcactgggactacaggcatgcaccaccatgcccagctaatttttgtattttttagtagagatggggtttctccatgttggccaggatagtctcaatctcttgaccttgtgatccacctgcctcaacctcccaaagtgctgggattaccggcgtgagccactgcgcctggctgactcaccctaaattattttatgtgtgagattcaagaaccctctcttgaggtttggattgtgatcctgttgcgggacgcagaggactagagagactagtatgggtgaataaaggaggatatttattttaaggtacgcactggctcagtggattcacatctaaaaagctgagacttgaacaaagacagagtggggtttttataagtgggcttacaaaagcaaaacaaaagcagttaatcatatagtgcataacctgtggccttgcatagctggtggccttgtagctgcatcaaaagaaaaacaagaactggctaaatacagacatttataaaacatagtcatgcttaagaggcaaaggaaaggagtaacaataaatgaatttgtctttttgtttttcttcaaccttgctctggagtgggggagtttctggagtctattccttggccttggctttttggatagcgttatcttataaccgtccttgaagtgagctgctaggcagaggaaaactagtttctttttctttttaacccttactacaatccctttctggtcacaaaataatggaagaatatttatacacagataaaaaacctgaagtacaggaaagaaaagtgagttacagaaagagctggattaattagagcttggcatttgctttatttagacatgaattagagagttggcctcttttgattggccaaaatttgataactgacacaaaactcagttacactttatttacactttcagttgggtttcagtttaccatctatgaagaaaccctcaggctcaattcaaaacacataaaaaggcagctttaggttaaactttatttaacaaaacagatttaatatgtctgcaaatgcttttcatctctttttgatatttggagactattcatgattttcaacactgactaaaactactgtgcctgaaacaaactctaaccttgatatcatgtgacttatagataaatctgctaaaaagatattttattctgctgaaatttagaaaaatagctgagtacatcttgaagttgtcttttgagttttaaaggagcagagctgctttttaatattctaaagtcagaagcagccatgaggcaattctcagcagcacacatgaaaatcacacacagtgaatgcatctttcactctgaaccaattgttttctccccagtctgcgtgtaaaaatcacctgggggaggcgctttaaaaatcttcccaattcaaattgatacaccccaattaaatcagaattcctggagtggaacctgggcaacagtgttgtttaaatatctcaaggtgacgacagagtacagccaagctcaaagccactgctttaaaccaacactttttagattacctacttgccaattaattctcaaataaataaaaaattgtttgccactaagtcacggtctttcagtcttaccagtattatcaaattacaacttttttcagaaccaaccttgctattggttctgttcgtgattcaacctggttccatcgatactgcacactatgtgcagggcactgtgctaggtgccctggccttggtgattattactgtgagaaaaacattttcttaaatttaaaaaagttgcatgtccccaaaacaaacattacatgtacccaaattaagaaaaaaataaaaatacctatgagtcgcccaaaggttagagcttttttttttttgagacggagtctcgctctgtcgcccaggctggagggcagtggcacgatctcggctcactgcaagctccacctcccgggttcacgccattctcctgcctcagcctcccgagtagctgggactacaggtgcccgccaccacgcctggctaatttttcatattttttagtagagatggggtttcaccgtgttagccaggatggtctcgatctcctgacctcgtgatccgcccgcctcggcctcccaaagtgctgggattacaggcttgagccaccgcacacggccggttagagctttaatactccctctgaatattaacatctgtatgattatgtcctgagtgagtgtgttccaccagaaaacaaataaacaaaaaacaaaatcctgccattattctgagatactcagttagcatttttgtacaaatatgtactatttaatttttttattaatatgtaacatgcatacagaaatacatgcacaaagcatttattcatgcaaaactcaataaattgttacaaaaaatacacttgtgtaataaaaaaataaaactaggcctggtgcagtgtgtcactcctgtaatctttgtattttggaaggccgaggcctgcagatcgcttgaactcaggagtttaagaccagcctgggcaccgtggtgacaccctgtctcttctaaaataaaataccaaaaaacaaccaggcatggttgtgcacacttatggtcctagctcctcgggaagctgaggtgggaggatcatttgaacctgaggggtgggggttgcagtgagccaagatcacacccctgcactttatcctgggtgaaagagtgagaccctgtctcaaaataaaataaaactagcctcatccatgccccaacaattgctttatcctttcttctccaacaatagccataatcagagctaacattatagattaattttgttattattatagaaaatttttaacatgtgcaaaacaaacaaaacacatattgttgaggcttgtcaatagacttgtcatgaagcctcaacaactaatcttgtgccattctggtgtcatccacccttctctacttcagtcagccctggtcaacccattggccaccctccattattttctttaggttttttttttttttttttttttggtgaggtcgagtgtacatacattgaaaggcacaaatcctaactgaaacattttgacagataaatacactcatataacctttatatcttttaagaatgaactgaatattgttctattctagtgatagagcataaaatggaatgatgaattatttttcattctcagataattccttcaggcctttctttcagacaattttgttgtcacaagaggctattttcttggtgatttttttttttaaccattggttcattttgcctgacatcatacaatatgtactattttattttaaacttgtctcatttagcaggtttatgggattcatccaggatgtttgcttcagtagtttgtttctttctatgactgttctcttgtgtgaatgagttacaagttttccatccatttcctagagatggacatttgggtttttttcctgctttaagctattatgactaaaaggtttataaacattatcgtacaaatactttttactatataattttattcctttattagcatagcatttaagtgacacctctttactttttttaatggtttctccgggtattacaatatgcatctttaacatatcacaatctacttaaatactgtactattttaataaatgtaaaatatgaaggccctgctgttaaaaagtttgaagtacctccttctattttttgtgctatttataaattttatgtctatgcattatatatgtcacaatactggtttatgacatttgttaaatagtcataagtcttataaagaaattaagagaaaatgatgttcataaatatttagaggcaaatattttgaggctatgtaaatacactgtttctcttttaaatttacccacaatttttgcattcttcagtacgtggtgtctacagtaattattattgtggtgtcctagttgtgattttctattttgcattatccatctacattaattagtacttggaattctataaaaaagattttcttcctatctctatttatttctatttattttttctagatctgtatggacttatgaatatttcttttattctcagctttataatccaatcctattattatttattttgtttctcatgttgttccagcttgggctgcttgaaagtctttcaggttgacttcctctgacatgtcttcttctgttgttcataaagcacttttttaactttctggcttcacaagatactctaccctaacttgaatgttccactccactgctagaattatctaattttatgaacagtcttgcttccttttattaaagaatagtgcttagaggccgggcgcggtggctcacgcctgtaatcccagcactttgggaggccgaggcaggcggatcacgaggtcaggagatcgagaccatcctggctaacacggtgaaaccccgtctctactaaaaatacaaaaaattagccgggcgtagtggtgggtgcctgtagtcccagctactcagaaggctgaggcagaatggcgtgaacccggaggcagagcttgcagtgagccaagatcgtgccactgcactccagcccgggtgacagagcgagactctgtctgaaaaaaaaaaaaattaaaaaaaaaaaaaagaatagtgcttagaaaccatgatatgagagctaggtgtgctcagtaatactgggatgtcactgcttctgaaacctctcagcaaacagagtttgaaaatttacatattaatatagattcatgtaggaacacctctcctttctctctctctctctctctctctgtctcaattgatatattatgagacatgcatttgtctaaatattcccaaatctggtccagcaccacagggtttgttctagaattctcccccgcttttttttttaacttcagaggaaagcaggcagtaatgaccttatgtatagtgtgtgtttacacacacacaaagacacatacacacacacactaacagaaagagtagttttaaaaattgctaatctttattcttataaacaaacagtactaaccagaatacagtgtttgtgttcagttcttcagtcttgcagtattcaattaaaacagtttttcattttattattattattattattattataatttaagttttagggtacatgtgcacaatgcgcaggttagttacatatgtatacatgtgccatgctggtgtgctgcacccattaacttgtcatttagcattaggtatatcccctaaaacactgtttttcaaagtgatatacatcaagacctttcattccaatcttctgaaatagtgttaggttagataatacatttttagtaaggctaaattctattttttactgcctgcattttatcagaatttcctcaaaatcacggtttcttttttaatttcctgaaaggaaaatttattctttgtgatgtacagttccacgaagtttgacaaccgtctagagtcatgtcctcgtctccacagtaccacacagaactctttattaccctcaaaatcatctaatgcttcccattcgtagttaacttctaccttcatctattctttggcaaccagtgattatggtttagttgctgtcttcctcctcctccccctcccccctcctcctcctcttcctcctcctcctcttccttccttccttctttctttgtctcctcctcctcctcctcctgtagggaggtcttgctatgtttccaggctggtctcaaaatcctgggctcaaacaatcctctcacctcagccccacaaagtgctgagattacagacttgagccatcaagactgcactgattatcaatgcctttaatttctttttctacaacgccataaaattgaatcatataatatgtagccttttggatcctcctttcttcacttaaagaaatgcatttctgactccttcatactgtgatgtgaatcaatagtttctttctgttgacaactgggattctattgtatggataacccacagtttgtttaatcattcacctgcagaaaagtatctggtttacatctagctttttgcaattacaaataaagtagacaataaacatccacaaaaaggttttcactttaacattagttttctctttgctttagtaatgacctaggagtggaatattttggtaacctaataagtgtatgtttaactttataataaaccactgaaccgtttttcaaagttattgcaggagtttatatttctagttctagttgctccaagtcctcgccaggtctaagtctttgtaatttttctctgcatggttgtcattctcatgattgtgtgctatttcattgtggcttatgctttatttttttccattaatattgggaagcccaaaatatataatcaatgtaggaagaaatgtatagaataacttggtataagccttggattctggaaactgacttctagaaatctgctatgcaattagcgctttgcaaacattaaacaaatactttatagtttattctctgtggttctctctctctttcttttttttttttttctttgagagagtttctttctatcacccaggctggagtgcagtggcataatcgcagcttattgcagcctcgacaatccgtgctcaagctattctctcacctcagccttctgagtaactgggagctttccgcgggcagagtggcaggtgccgcgccggaggtggtcatggtggagtgggcgtccctgctcggcgtcctgcctctctggttaccgcctccttcccgcactccgccgggggctagtccccggcaggtgtttggggagagtggtggggtttgctgagtcgcgggcgtcggagggttgtggcccggcggcccctgttccaggggtggccgcgcggacttggtggtggccgtcctgtccgcggcgggaggtgggcggggcaggcctggcgcccttcctcctctttctgccgcccgggagaccagccgaccgctggggagaggtgggaatgaaggtcagtggactcagactcaggccgcaagcgtcacacttggcctcttcccgcggtggccacgttgaccagatgtcggcctcgaaccgacagcctgaaaggtttaaggtccaccaggtggctctagcccgcagcagcaccgcatgtgtccagcagagggtgagatcccgtctaactgcagcctccactttccaggctcgcccaggtgatcctcccatctcggcctcccaagtacctgggactacagggatcttcttcctctgttttttgttttttgttaatttgcttgttttttttgacggtttccatttcatttccacagtactttgagttgctgttttattttttgttgttgttattttctctctctttttaaaatttcttacgctctttgcacactgaagttgctattgttttagatttactttttttttttttttttttttggagtcaggtcttctcactctgtcacccagactggagtgcgggttcgtgatcactgctcactgcagctttgacctccctaattgggacttacagagattgccctccagcctgggtgatggagaccctgtctgaaaaagagaaacagggacagagaccagttaaaaacacacacatacacacacattttttaaaaattaagtacaattaattgttatcttcattaccttttacttctgttcactcccacttattttattgttattattgtttggaataatttttgttattgtttgttattgttactgtttatttacttaattattattattattttgaaacagggcctcattctgtcacctaggctgcagtacagtggtacaatcttggcccactgtggccttaaacttttgggctcaagccatcttcccggcttagcctccctgcaagtagcaggaactacaggcatgtgccaccacgcctggctaatttgtgttttatttatttatttatttattgtagaaatgaggttccaccatgttgcccaggctggtctaggctagtctcaaagtcctgaactcaagtgatccatccaccttggcctcccgaagtgctgggattacaaacatgaaccaccatgccttgctatctatctatctatctatctatctatctatgtatctatctatctatcatctatctatctatgtatctatctatgtatctatctatgtatctatctatctatctatcatctatctatctatctatcatctatctgtctttttagtagacatgtggtctccctatgttgttcaggctctggtcaaatatattttttaactttaattattattattattattttttaatagagatgttgtctcaccaagctgcccaggagaatctcaaactcctgggctcaagctatcctcccaccttggcctcccaaagtgctgggatatagccatgaaccaccacactctgctctatctacctatctattcctttagcagagacacggtctcactatgttgtccaggctctggttatatatatttctttttaaatttcaattattattattattttaatagagatggggtctcgccacctatcccagtatggtctcgaactcatgggctcaagtgatcttccccccttggtctcccaaactcctgggattacaagcgtgagccacctggttatatttttgatgtgttgattctttgcagtttgtgttccagtccagatgcatagtgatagtacagggattgaaaacaaaaattttgacacagatcaatctcacgaacttaccttcctttctagtagctcctaatcaagtgaagtgctcctaatctctggtggttttaaatattgtaggaagcattgccctattttactctgtgcactgaagattttttctagttctggaatacagataaatctagagtctgttcttgatcaatcacaagaaaatcaataaacctttttccttattctacttccctttcttgaaagggagggccttgatttgcgttgctgcctgtagacagctatttgtctaatttttgttgaaactgggagaagactgagcctgacaaggctgcagggctgtgaggccctgcccctcaactaaaaaaaatatttaggggtacatatgcttgtttgttaaatgagcatactgcattctgctggggagtgggttccagtgcatccagtacccacatagcaaatgttgtatctgataggtgatttttcatccctcatccccctcccaccctcctcccttttggagtccctgagtgtgtatgcgctgtttagctccgactaataagtgagaacatgaagtatttgcttttctacgttggagttagttcactgagtgtaatggtctccagctccatccatgttgctgtaaaagacacgaaatcattccttatggctgcaccattggataattttagctttgttattggtctcccttccttccttccttccttccttccttccttccttccttccttccttccttccctccctccctccttctttccttccttccttccttcctccctccctctctttctctctctactttctttcttctttccttcatttttgttttcttttgtttgtttttttatctcagattacacacaccaaaatttatttttttgagacaggatcttactctgcccccctggctgcagtgcagtgggcatgatactagctcactacaacctcaaacctcctgcctcagcctccccagcctcctaagttggggcccagcgtgacgtgtgggtcaccaccttgccaaatcttttttttttttttttaaggaggtggattcaccctccccatgttgctcaggctggttctcaaactcctggcctattttaacatttttttttggtggggcagcgtggggcaactgctgcatagctgttctacatagggaaaatctatttttatgggaaagggggaaggagatacttcttgaaacttccctcttcaaatccagcttctggttgtttaaatgagcatctgttgtgaaatagaaaatattgaaaaataagaacagagataaaaagcacaaaataaagtttctcttgtcatcaccaagggtgtccctttgaccagaaagggaagttttagtactaaatcattcctctccctgaaaccaccattgcaaaattataaccaagacagtgaaaaatatctgacctaacaaactccattttgcttctaaccttcaagctgcccttgctcattcctgggaataggctgaactaactttggaaagaacttagtttatagattatagtttaaaacaaagatgataacaaccctttcccaaaacaaacctccttcttgcctggggactagactgccttcgtaggactaacaaattagtcacaagattaaaaattatggtttaggagtcatgcacctggaggctacaagattctgaccctctctaaactgctcctaagatcagtgcttgagctttttgcacaccagggtctgcacttgatggatcagctgccactactcagattgataaactggttcatatggtcttgtggcctccacccaggaactaaatccgtacaagaagacagcttagactctctatgatttcacttctgacctgaccaatcagcattctcgactcactggccttcccccacccaccaaattattcttaaaatctgtgatccccaaatgctcagggggacagatttgagcaataataaaattccagtctcccacacagcccactctgcatgaattactttctttgttgcaattcccctatcttgataaattcactctgtctaggcagtgggccaggttgggtgattacaacactagaggtgtacggaattccattgagaggcaaaaagtttatctggatatctagtgaccttggcctagggaaactgccttacgcttattataaaacataatgtgggggcaaagggagaggtttccctttggccctctgaagtttcactgagaaatcaactcatcaaaggcagatgaataagagaaaaggcagacacacgtttctgtgcacagagccttcataacgaagaccccaagacagtggggaaattgtgtttaggttttatttatttatttaagacagagtcttgttctgtcacccaggctggagtgcagtggcatcatcttgggtcactgcaacctctgcctcctgggttcaagcagttctccagcctcagcctcccaagtagctgagattacaagctcgtgccaccacacccggctaatttttgtgtttcttagtagagacggggtttcgccaagttgcccaagctggtctcgaactcctgacctcaggtgatccacccacctgttatggcatcaacagcattatataataagtgtagttattttttgagtaccccccttccttctctctctctctgtctctctttaaaataagctcaggcagatctaatccatttccaaagcctgaattcttttttttgtttgtttgtttgttttgagacagagtctcactctgttgcccaggctggagtgcagtcacacgatctcagctcactgcaaactccacctcccaggttcaagcgattctcctgtctcagcctcccaagtagctgggattacaggtgtgtgccaccacacccagctaatttttgtagttttagtagaggtagggttttaccatgttggccaggctggtcttgaactcctaacctcaggtgatctgcctgcctcggcctcccacagtgctgggattacaggcgtgagccaccgtgccccaaagcctgaattcttaatccaacattggatctctatcccaaatcctgtagagaaccagtaagttgatttctggacttggatgcctcatagacattacatattaataatgacccaaccctaaaactgggtttgcttcttcctcattcaactcagctgtgacccagacttactggctcaataaattgtaccactgttcacctaggatactgggagagtttactcaatctgtatctccccatgtcctaaacaacccgtgaccaagtcctgtccattcttcctccaatatgtatctccaaaaacttctctccatttccacaactacccatagccctttgtggagccactggctctttgaaggacatcggagaatttgtttcaggtttgcaggtatgaggccaaagcctgctaacattcctgccccagattttgtgtaaacaaaagtatctctgctgggggcattgagaccatacatacttctaggtttggatgactctcttgaaggatgcatgggaccccacaaaactgacacccccaacaaggtcagacatctgctactgcatggtccaaggcctccaccatagatcaccaccgttgtgagcctaaactgccaagggcaccaactccagggagactgttgggaagccagccttcctctgctaaagttgaaagtcacaggaacctccacccacaaggtccccactgcactctgaagatgtggagaatgagtgggtcagagagaaggcatggaggggagacttcctggccagaatgagtttcctaggctctggccaccccacccgtgtctcagcccacgagacaccactctctctcctcctcttctgtccacaagcccctgaagcccacacactgcaggtgagaaaaccacacagtgtgaatagaatagagcctgacacccttctcatgtgagtgtgtcctgagcacatagacgggaggtttgtttgacggtggcatcattgtttatctgcagctgtatcctagggaagcaattctcctattttctttttttgttttttttgttttgagatggagtctcgctctgtcggccaggctggagtgcagtggtgcaatctcggctcaccacaacctctgcctcctgggtttaagcgattctcctgcttcagcctcccgagtagctgggtctacaggcacgcgccaccatgccggactaatttttgtatttttagtagagaaggggtttcactatgttggccaggctggtctcgaactcctgaccttgttatctgcctgcctccgcctcccaaagtgctgagattacaggtatgaggcatcgtgccaggcaattctcctattttgattgaagggagcaagagctaatttcaggggggagtctatggaaagtccgattctcccacaggctgcagactagaaatgaatatggcttcttgggcagtggggattcaaatgaatatggctttttggacggagggaattcctttggccttcacgttttcgggagcttctctcaaaccctcccttgaggctagagaatagattcccccgacatttcctcaagtgcccgatgtatcctgtcaagcgacccaaggacgacacattgagttaaaaacccccgttggttataactggagattttagattcaggccacacctcactctacgtcacagaatgcgcttttccagaagctaagcagaggagctgggctccagagagaggaaggggctgagaaaagcacaggcggagaaaagacgatttttcttacagggctaaaatgcaggggacttccttatcctgccgacttagagaagcccggccccttgtgatccattgctgaaagccgcctcgtgtttgaaaaacggatccgctcccaacttcagtggaaggacatgacatgtagcacgaggtattctgttccttctgatgtggtctgctcagcggggcctaaggctggagttcgcccacaccaatggctccctctgcatggggttccatcatctctaccctagaacatggtccttggcgaattctggctcttaagtcgctgtccaaaaccccatcccatgctcaggctacccgaatgaccttcgcttgcacctttccagaaacgtttcaaatctatcctccatgcatggccacctaaaaatgcagaagcacagaacactcggtcgccattcacctcactgctttcaggagagaatgctcaaggtctcttgctgactttttttttttaacggagtttcgctcttgtcgcccaggctggagtgcagtggcgcgatctcggctcactgcaacctccgcctcctgggttcaagtgattctcctgcctcagcctcccaagtagctgggatacaggcgcccgccaccacgcccggctaatttttgtatttttagtagagacggggtttcgccaagttggtcaggctagtctcgaactcctgacctcgggtaatccacccgcctcagcctgccaaagtgctaggattacaggcgtgagccactgctcccagtctctttctgaatcttgactctgtgggcaccgcccgttagggaggctcgcgtccctgcccaggggccttcattaaccgaaggggacgtgccacgctgggggtgttcgaggtgtgggaggcctcctctgctggcgtcccacctctccgtttaccgccttctcccatcactccgctgggggctcatcccctgagacggggtccgggagcgtggtggaaatgatcgaggtgtagaggttggagggtcgtggcccagcggcttctgtcccagggggtggcggcgcgggcccgggggtggccatctgggtcccagcccttccttccctgtagcaggggcggacgaggtgcatcctgttccacccctgcacccttctcctccccgcccccctccgggtggaccagcagaccgcgggctgtggtgggaaggtgggcgggcttatgccaccagccgcccccactgcgccgcccacgtctaaggctccagctgggcggaacagtctcaggtctggagcgccacacttggctgtagggtggacccggtgcgccactgcccacggccaccggctggcttctcagtcgggccactgggtcgaccagatgtgggctgcgagccgcgaacattgctcttggccactagctcgaaatactaaaggtcaacctaaatatttaatatcaaacatttaaatatttacgcacggcagtgcctcctaggtccagcggaggggtgtgatcaggcctcgctgtggccttgaacccacgcccctactctcgggctcgcccaagtggccatcccatttctgtcttcagaggagccaggattccagggatcttcctgtgattttttttctagttccacttccattttctttcctcagtactttgagttgtttttccttgttctctgtctcttaacactccttcctgcacattaaagttgctgttttgatttctttctttcgtcttgtttttctttcttttttctgagtgaagtcttctcactctgtcacgcaggttagagtacagttgggtgatcacggctccctgcagcctcgacctccctgggctcaggggttgctcctgtctcagcctcccaagtggctgaaactacagggatcgcttcagcctgggaggtcgaggctgcagtgagccatgattgtgccattgccctacagcctgggtaacagaagaaccctgccagaaagagagagagggggtaaaattaattgggatcttatttaccttttgccttcgttcactccattttaaaaaaaaattaatattgtttgttctttctttgtcacttgttattgtttgtttttattatttatttttatttttagacagggtctcactttgtcacccaggctgcagtataatggcgtgatcttgactcacagcagcctcaacttcccaggttcaagcaatcctctcatttcagcctccccaactccctagtagctgagactacaagcacacaccacctgctggctaaccttattttgtgctttgtacattttatttttgtagagacagggttccaccatgttttctgtgcacgagcaatctgcccaccttggcctcccaaagtgctggaattacaggcgtgagccactgcgcctggcttgctctatcatctatctatctatctatctatctatctatctatctatctatctaaactatctatatctatctatcatatctatctatctatctaaactatctatatctatcttatctatctatcatatctatctatctatctatctatctatctatctatctatctacctacctacctttgtagcagagatgtgttctcactgtggtgtccagggtctgctcatatatatttcttttttaacgttattattatttcatgagatggagtctcattgtgttgcccaggctggagtgcagtggtgggatcttggctcactgcaacctctgcctcctgggtctaagcaattctcccacttcagcctcccaagtagctgggactacaggtgcgtaccactatgcctggctaatttttgtatttttagtagagatggggtttctccatgttggccaagctggtcttgaactcctgacctcaaatgatccactcacctcggcctcccaaagtgctgggattacaggcatgagccaccgtgtccatcccggtcatattttttatgtgttgatttttttcggtttgtgttacagtccaagtgcgtagtgatagtaccgggatagaaaacaaaaatgtcgagacagatcaatctcaggaacctgtttttttttggttggttggttgtttttaggggcacaagccccattgagtgaagtgctcctaatctctggtggttttgaatattgtagaaagcattgcagtatttaactctgtgcactgaagattttttctaattctagaatacagataaatctagatgtatggttctcgatcaatcacaaaagttcaatagcctttttccttattctacttctctttcttgaagggaaggaccttgattcagatttgctgcctacagacagcaatttgtctacattattttctcttctttttcttattgggagggaactgagcctgagaaaactgcagggccatgagctgttagattacttccaatgagaggaaaggaagtgtgtgtgacaacacattcggagagaaatcaggggaggtggcagagcaggaagcaccaggaatctgtctccccacgtaggccaaagggaagctggcaggatctatctgatggagcgatttggcaactctggagtctatgggaggcctgctgctgccagggggaagcctggaagatacattgtaatcagtgccagttcccattagctctttgtttcccacccccaccctctctgtgcccccctcaggccagagtcacagcggtggaaaggcttctaaggagaggtatgtgggaaggttctcctacaagtcaggttctttaagctgagcttattttatttctggtctcatgttcaccagaataaagaagatattccttaatgactcgatggccttagtttattttctgctcacaggtttgagctataaaaaccaatttttcttcatatgcaatacatgaaaactatgtatgtcagaacatgcttctcttagtgtactcttggggatatagtttaaacagcaaataaaatttggcatgtatggaagtttctttttatattatcaagagtacaaatatctatcaaaatctttacctcttatgtctctaatctgtatgaatacaaagagcatgatagttagatctgcacatagatatttataggtagataaacacaaacataaaattatgagtttgtctatgcaaatatttatgtatacaaaataagttcaagagaaaataagttcaagagacattctcctccagcgaaaactgatgttgcagacatagacttacgttcacctatatggctctataccatctcaggctggaacccagctatgcaatgttatgtataaaaatcaacaaagattagcattgagggacacagcccaggaagtaagcgtccagtactgttatgtaaggtttcatggaaagcttggaatttgaaggccctgcttttttcttttcactgtatacctctgttatttatatccaccatttggggcctttcttgatgcttctgcttccccaaattagctaattgtctgattatatttgcctgggctgagctaattggctgattaaaatcacctgagcttagctaattggcttatagaattcacctggtctggatgggtaggaaaggaaaatgaactttgatcttctcttcttctgaggattttttttttttaccaggcataagcacaaatggactctagctagatacaactatgtgaaccattctgggtgtatatgtttcactattcacatatcttatatcgataaatacatatacaaagcaaagcaaaacgaagctaggtaagaggtcatttttattttcattctttccagaccgggtgaatcaaatcagcctattagctcagtggtgatttacccaatccaagccacatattgcatcacgttcttttttttttttttttttttttgacagagtcttgctccaggctggagtgcaatggcgtgagctgggattacaggcgtgtgccacaaagcctggctaatttttgtatttttagtagagatggggtttcaccgtgttggccaggatggtcttgaactcctgccctcttgatccacccacctcggcctccaaaactgctgggataacaggcgtgagccactgcacccggccatattattcttataaatgtgtaaatgttcttgttacctggcactcgagtgtttttaattcaggatctaattaaatccgctcagtggaattctaaccatacagctaggacaagtctgaggtgcctgacaccaggaaccctagcctttctcacatagaagccttagcctggagaataagagccagcattgacatttcagcacatgttcactatcacctggttgaaatatggccagggtccagctttacatgataatgaatgactcccctggccttagtgcatttttatttcctagaagaaagaaactagaaacaatgctttcttcatatatgttaaatgcagcaggttgtatttaaaaacatccttctatatgtgtgattctggatatagtttataagacagttaagattatgcatatgtataaaagtattttttataccactattagaatcaatacctatcaatacttccattttccacatttttattctgtatgaatatacatacaaagctaaatatatttgcatatagatatacataggtagaaaggtaaacaaaaacccatgcaggattatatgagtatgtttatgtgaacatttatgtatacaaagcatgttctgaaaagacattttaaatgctctagtatatactaagaacacaaatgtatactaacttcggtactctatggcacaataacatctcataatgaaacagagccaagcaatgttgtttgtataagtgtaaagaaagcttcaggttcagggaataaatctagacagtaagctgacagtacagctatgtaatgctatatttccaggctagcatttcagactattgctttgtttctcactgtatcaacatgctatttgcattcactatattaggcctgacttgatgaatctgcagtccctatttagacaattgcataattggatctgcctgagtcgagctaactagcttattaaagtcacctggactgagctaattggctgattggattcacctgagctgagctcattgactgattgggttcactgtttctaaagagaatgtgtagaaaaatgacctctgatttacttttattttggggctgttttagaaaaaaatacagattgacatcacctagacatatttacataaccctgtgtgtttgtatatgtttatctatctatctcatatttatatcaaaatctacagagaaatgtgtccaataaaactaacttttttttcagtattgaagtaaatgctcaagttacagcccttggcttttattctcttacccaaaaagtcactacttcagcaaagaaaacaaaaatacaaggttttattcctatgacatatttaaaatgattatttgaatttatgaaagctttaaagacaattattcagcactttcacatttgagtgagagcctttaaactgaggctattttatttctggtcctatgtttaccagaaagagaagggtcacccttgacctggcaatgaatgtttcataacctcagtgcatttttgtttttcagaagtgagcaacaaggaatgatgcttcctttgtgtctgttaaaagcagaaagatgtatgtaagagcatagttccatttttgcactattttttgtatagtttatgggaaagttaagtttatacatctataatagcatctttctatgtcactgtcattatcaatatctatcaatatttccactttatacaacactattcttattttttattgagacaggttctcactctgtcacccaggctggagagcagtggaaccatgtaggttcactacaacctctgtaccctgggttcaagtgatcctcccacttcagcctcccaagtagctgggaccacaggcacatactaccacatctggctctttaagacccttgagctcaagcaatccacccccctcaacctcctgaagtgctaaaattacaggtgtgaaccaccgcacctggtcatacatcattattttttataaatacagatacaaagatggatgcatctgaatatagacatacgtagataaacatacacacacatacaggattatatgactacatctgtgtaaatattaatgtatacacattatgttggccaaaagacattttcaataccctagtatatattataaagatgtagaattaattctctactctgacacaatagtattccagaatgaaacatagacatacaatgttgtttgtttaaatgtaaacaaagcttcccctacatgagagatttgggaagatgatagtacactaatgtaatagtttatgttcagattagcattttatggccctgcttttgttttcaatatatgaatgtgctactctcgtcaaccattgtaattctgccttgaggaattcactgttgatgttttgataattgactgattgagtctatcttcgctaactggctgattggaatcacctgacctaagctaattggctgattttattcacctgggctgagctaattggctaattggattacctgggttgagctaatgaatgattgaaatcacctggagtgacctaatcagctgaatgaattaacctgtcttgagggaaatgagtagtaaaataatgtcttagttttgaggcttctttatgagacacaatcacaaatggaaattacatagacgtatctgcataaccctgtgatttgtatatattaattcatttacatattttatatctgtatctaaatctacaaaaaaactatccaaagaaaacttaaatttcctttcagaatagcagactaatttttagtcacagactttaattttttttctctacctaaaaagttacttctctagccaacaaaataaaacaaaaaaatccccaaattatcatgctatgtcatatattcatacaaaagatcccctgaatttctggaagtttaaagaaaattattcggcatttgcaaatttggggcaaagctggggctaatgtatctctcgtctcagttcactagaatgaaaagggtcattcttgacttggcagtgaatgactctcatggccttagtacattttctgtttacagatgtgagcaacaagggccaattctttcttcatatacattaaatgcagcagaatgtatgtcagagaatacctccatttgtgtactcttgcggatgtagtttaaaaggcaaataggattttatgtgtatggaagtttttttaattgctatcagtagaaatacctatcaatactttcaccttctctctctttattctgtatgaatatgtatagaatgatagataaatctggatatagttatgcataaggagataaacacacatacagaattatatgtttgtctacataaatgttcttgtatgcagaagacttttttgagaggcatttttaatatcccattctgtctggaagatgaagacctagacttactctcacctatatggctccataccatcacagactgaaatacagacatataatgttctgtataagtatcaacaaaactttatgttaaggggcaaagcctgagaaggaagcttccattcctgccaaataagactttatgttgaccttaaaattttagggccctgcttttctactcgctctatgactgtgttgtaggccattttgtgcctgccttgatgctttcgtctttcacatttagctaatgggctattcacactatctccactgagtggattggccaactgaatttgcctggctgagctaattggtttcttgaattcacctggtttgcaggagttgtgaagggaaatgacctctgatatgcttttttcttgaggctttttaaccagatatatggatacatggactttgcatgaacatacacaggggacccattctgtgtgtgtatgtttatttattcactaatcttatatttttatctatatgtacaaaaaaagcccccaagaaaaaaataggtcaggaatacttcgaattttctttccctccaggccagatgaatccaaatagtcaattaactcagtgaagattgatccaatccaagccacacacatcacattattcttataaatgtaaaaatgtccttgtcacctggcacccggttgtttgtaatgtagtgtctcatcaaaccagcttagtgtggttgtaatcatccatttatgaagagccagagatgcctgaaaacattgagcctgacctttctcacaaaaaagctttgacatcaccaaaaaaatttacctttggcattttgcacatgttcactattgtctggttgaaatttggccaggtaccatataccaagatatttgtgttcaatatcacagtctatcttctgaaaacaggcctaatttttttattaccataaaagtcatattacagccacaaagaaaaaaatacaaaaacgtatttttacaacacatgctcagagttaagaacaagagcccttttcgtgatgaaagctttaataggaagaaataagcattctcaaatttgagttatagcctttgaaatggggctaatttatcactggaataaaaagatcattcttgacctggcagtgaatgactcgcatgactttagggcttttctaactcccagaatggagcaataaggatcactgctatatatatatatatatatatatacacacacacacacacacatatatatacacattaaatctaacaggaggtatttcacagtctatctttatttgcatactattctagacataatttacagggcagataagtctatatatatattgaagtttttatattactttctgtatgaatacctcccaatacatctatcttctatgtctttattctatatgaatataggtaccaagatgaatacatctgaatatagacatacatgggtagattttaaaaaacacagaaacagaattatgtgagtatgttaatgaggtaactggctgactgtaaccacctgggcttagctaaatggctatttggaaccacattggtttagataactggctgattgtattcacctgggctgagttaactggcttattggaatcacatgttttgagctaattggccaaatgaatttacatgggctaggctaattgacttattgaaatcaccttgtcttagctagttggctttttagaatcacccaggctgagctaattgactgattagattcacctggactgagctatttggttctttagaatcacataggctgggctaattggctgattgtattcacctgagttgaggtaatttgctgattggaatcacctgccttgagctaattgtctgattggattcacctgtcatgagagagattagtaggaaattaatcactgagtcccatttattttggggtttttttttacaagacatactcacagatgaacattacatagatatatttatacaaccctatgtgttttatatgtttatttacctacatgtcttatatctgtatctaagtctacagagaaaaacatccaagaaactctgaaatttgctttaagcattgtagtctatcttcgagtaataacgcctagattttcttgccttactcaaaaactcacttcttcagccagtaaaagaaatacaatacagataattatattttcatttcccatgggaaaaaaaatcctctacattgatggaagctgtaaagagaatattttagcactttcaaatttgaaggagggattttaagctgagactactttatctctagtcctgtgttcatcagaaaaaaagggtcactttgacctagcaattaatgttttacatggccttattgtatttttatctcctagaagttagaaacaaagaccaaggcttccttcttatatgctaaattcagagagacgcacaaagagcatacctacatttgtgtactaatttagatatagggcagataagcttatacatctatgaaagtatctttgtatattactattatattataaatagtatgattaatattaaactattgtatattactattatctttgtatattactatcagtatatagtatacacttctactctctacatatctgttcttttttttttttttttgaggtggagtcttgctttgttgcccagactggagtgcagtggtgtgatattggctcactgcaacttctgcctcctgggttcaagcaatttttctgcctcagtctcccaagtagctgggactacaggtgcacgccaccacatgcagcaaatttttgcatttttagtagagacagagttttaccatattggccaggctggtctcaaactcctgacctcgtgatctgcccgccttggcctcccaaagtgctgggattataggcgtgagccaccacgcccagcaacatatctgtactttaccaatattgagacaaagataaatacatctggacataaatttgcataggtagttagataaatgaacacacacatactagattatatgagtaaatctatgtaaatatttatgtatatacaggatgttcaccaacagacattttagtaccccactacatactaaaaatgcagatgtggacttactccccaatctctggcacaatagcaatttagaatggaacacagccatacaatgtttgtataaacgttttcaaagcttcgtctctaaaggcaaggtctggaaggtgagctaaccataaagctatgtaaatctttatgtccaggttagcatttcagagtcctgctttgcttctcagtgtatgaacgtgctaatctccttcaccattttgggcctgccttgaagtatccattgtcaccattttgataatttgctgattgggtctaactggcctatgctaattggctgattggaattacctgaactcagctacttggacagttgagttcacctgagctaaactaactgattaaaaatcacctgggcttaaggctgggtgcagtgattcatgcctgtaatcccaccattttaggaggccgaggcagatggatctttttgagtgcagaagttagagacaaaaaaaagaagttcaagaccaggagaccagcctaggtaacatgggataaccccatctctacaagaaatacaaaaattagtcacacatggtggcacatgcctgtggtctcagctactcaggaggctgaggctggagattgctagaacctgggaggcagacattgcagtgagccaagatcgcacaactgcactccagcctgggggacagagtgagaccctgtctcagaaaaagttcacctaggctgagttaattggctgactgaaatgaccagggcttagctaattggctaattagaatcaactggtgtgtcataattgactgataagactcacccaggctcagctaattaatagattgacatcacctttgctgagctaattaattgactgattagaatcattttggctgacctaatcagctaatatgaatcacctgggctgaactaattggctgattgtattcacgcgtgttgagaagcatgagtagggtaatgacttctgacatacttttatttttttccaagacatactcataaatggtcattgcatacacatatttatataaccctgcatgttatataacctacagaagaaagtgtccaaggaaaactaaaattcactgtcagtacagcagtgtatcttcaagttacagacctcgactattcattccctaccaaataaagttgcttctccagccaacaaaacaaaagacaagaatttacttttttttgtcatatgttcaaaaaaaaaaaaaaagaatcacctgaattggtggaagctttaaagaaaagttttcagcatttgcacatttgggttagggcttttcagcagaggctagtttatttttggttctgtgttcactagaataaaaagggttatccttgatttagcgtgaatgactctcatggccttagtgaattttcatctcccagaagtcagcaacaaggactaatgcttactttgtataagttaaatgcagatggatggacgttatagcacgcctccatttgtgtactactctctagacagagtttataggccagaacattgtatacatctatggaattatctttatatatcactatcagtatcaatacctatcaacccttccaccttctacatctttaatttttatgaataaaaatacaaaataaatatatctggatatagatattcataggtagataaacacacatactgaattatataagtacatctatgtaaatatttaggtgtacacaggatgttcacaaaaagacattttcaataccttagtatataatcaggatgtggatacgaacttactaccctactctatgccacaatacaaacccagaattgtacattgtcatacaatgttgtttatataaacataaagcttcactttcaaaggtgaggtctttgaagtaagctgacagcatagcaatttaatgctttatgaccagattagcatttcaggaacctgcctaccttctcagtgtaggaatgtgctgtcacgtctactattttgggcctgacttgatgaatctgcagtcgctatttagataactgtttgattgaatccaagtttgctgagctaattggctgattcttttgcctgggccctgcctgcagaagtcattttgacgtatctatggtcccatcagagatgtgactgtcctcttatgcccagaccctgttcacagtgaagattgtgacatatggcttggcttagcacctaagtgatgtgactctcctattatgcttgggccctgcctacaggggttattgtgacataaagctgagcccagctcctatgttatgtgactctcttcttcttcctgagcccaacctacaggggcaatgtttacatatctctgggctaaacatatctctctgccagttaaacagttttcttctgttcatctctaatggaagtttgtaaatggcactacttagtgaatggaatagctttctaaaagctcaggtgctactgagaagctgacacaggatttcagtgcacttaattctaatcaagcaacaggactcaacctaggaagaaacagctggggaaaagaacctgggcaatgtgacactccatcctgggcactcccattaggggggattgtgacatatctttaaacctatcaactatttgatgtgactctcctgtctcacctgggctttgcccatgggcaagattgtgacatatgtattgggccataacccaggtgttgtgactcatttctcctgcctgataactgctcccagagtggattgtggcatatggttgggttcaacaccaagttggtgttgctcttttgccttggccctgcactcaggagacactgtgccatttcactgggctcagcaccgaggtgatgtgaatctcctgccttgaatctgttcgggggggacattgtgacatatctcagggctcatcaacttacaacatatttgagatgactcttttatctgatgtgggccttgcctattaaagtaattgtgacatatctctgggcccagtacctaggtgacatgactctactctcctgcctggactttgtccacagaagggagagtgattatcactgagcccagcacacaggtcatttaatacttctgcgttggccctgtccacatgttcattgtgatataactctgggcccatgccctaggcaatgtcactctcctctttcgcctgggccctctccttagtggggattgtgacatattacttctcctagcacctaggcgatggaacttcctctcatgcccgggccctgcctatgtgagtgattgaatagatggctagacgcagcctctatattatgccactctcttcttcctgagctctacccacaaaggtattgtaacatctctgaacccctctcctaggtgatttgacgcttctttctgaaccctttcctcaggggctgttgtgacctattactaaacacagcacctaggtgatctgacttttctacactgcttgggttctgcccacaatatagattttaatttatagctgagagccacacctaggtgatgttactctcctatcctgcctgatccctggatacattgtgtattgtgacatatcactgggtccaacagttaggtgatgtgaccctcctgcatgggccctgacaccaggagtattatgggatatctttgattcatcaccttggtgatgtgaccttcctcttctgcctgggacatgctaaaaacggggattgtgacacatccctgtaccagcacctaggcgatgtgaccgttcttttgcccgggccccatatactttgagtattttaacatattgctgggctcaacatccatgggatagtacactcctgcctgggccttgcccacagggagacttgtgacatatctctgcatgcatcacctagatgttgtgactcttcttttctacctgcaccctgccaacaggaaggattgtgacatatcgctgggcttagcaactaggtaatgtgtctctcctgcgtggccttttccacaggggtcattgtgacctatcgctgggcccagcacccaggtaatgtgattcttattgcctgtgccctgctcacagagtaaattgggacatatcactgtgcccaacacccaggtgacatgactctgctgcttgtgccctgctttcaggagaagattgtgacatatctttggccaagcacccaggtgttgtgactttttttttcctgcctgcgtcctgccacagtgaaaattgtgacatatcactggaccagcactcgggatttgacatcccttctcactctctatgcacaggtggtattgtgatgtatagtttggcctagttcacaggtgtgatgattactctcatactttgaaccagctagtaggagagatactgtcttttgtagcttgacttagcaaaacaagagtctgggttatttcctttcacaaaaatcacaggggattatcatgctcttgcctatcacataaagcccttgggtggtacagggtgtcataaaggggcccagcatagaggtgagattgtgtctctcatatgcaaactttgccaaccgttaagatggtcacccttgcatgtggtcagaggccactcatgagatcctaaatctcaagaaaagatgcagtccacggttagaattgtgagagtcacatgcgaatatccagatagaattgggatggtgactcatttctaaactaagcttataggttcattgagcactctcacatctggacccagccaattggagagatgttgatgtgggcttatggccacaggtaagatcgtgggcccataccagcctgaaggtatcagagcagatcgtgactctcacacatatcataaaaagccctcaactggtacagagagtatcctaacgtgactcagcacacaagtgagatcgtgtctgctgtacacatgcccagatgacagtaaagattgtcatccattaacactaacacagcccattgctgaggtcctgaatctcacacccagaagcagttgaaagttggaaaattgactctcatatgtgaatccggtccacaggtgggttggtgactctcagaccaagactcagcactctcgtgaggttgtgactccgctaaggagacaggctgcgggacggattgaggctttcacgcgtggctccagtccactgttgagactgtgaatcacgtacttagactcaacatacaggaggtgtttcctctcatacctgtaattgagaaatgtgcaggattgttaatctcatccctggcctttcatgcaggtgtgattgtgccctcaaaaggcattgtgaaatattggcgggcccagctcaaaggtgatatgaaatatgcctctccagcatttgagttattttacttttctgtgagagcccagtccacagatgggattgtgacattgctagacccaacaactaggtaatgtgactctattctcctgcattggcattgtccaaagaaggcaaataacacattacttgtcttcgcactcaggtgatgactcttctcctgccttggcactgtgcacagggggcattgtgacatatcactgggctctacacccaggttatgtaacttccatgcctgggccctgtgcatagtggccattgtgacatatttcttgctctacaactcagattgtaactattctgccttgccccctgcctgcaaagggcattgtgacacacctctgtgaacatcacaaaggtgatgtgactctcttccaaaatgggattgtggccaggtgcagtggctcatgcctgtaatcccagcactttgggaggctgagtcgaggggatcatctgaggtcaggagttcgaggccagcctggccaacatggtgaaatcccgtctctattaaaaatacaaaaattagccaggtgtggtggtgcacacttgtaatcccagctacttgggaggctgaggcaggagaatcacttgaacccttgaggcagaggttgcagtgagctgagatcacgccattgcactccagcctgggcaacgagagtgaaactctgtctcaaaaaacaaaaaacaaaaaaagctccaaaaaaccaaaatgagattgtgacatatcactggaccgagcaccttggtgatgtgactatcctctcttgcttgagtttcacatattattgttactgtgacatacctctgtgacaaacagctatgggtaggaaaacttctgcctggactcagcccaaggcggcctcatgacttttttaaaagatatgtgactttaaaaatgtgactgtcattttctgcctatgctttgccctcaggaaagattgtggcatattactgaactaagcaacctagtgacgtgtctcttctgactggggcttgcccacagagacaactgtgacatagcactgagcccaggacccaggtgatgtgactctgctgcctgtttccaacattcatgagaggatggtaactatcccttgccaagaactcaggtgatttgactgtcctgccttgttgctgccctcagagaagattgtgatatatcttcagccccaaacccaggtaatgtgacttccctgcttactccctattcagaggagaaattattacatataacctggcccagctcacaggtttgatgacaattctcatacctcaaacaagccaatagaagagatactgtctctctcagcgaggcttaggaaaactggtaaaatacctgtgtctcctctttgtatgaaggtcatagagaactaccacgtgctttgtatatggcataaagctcttgagtggtacagtggtacagagagtgtccacatgtcctaaaacaaaggggatattgtgtttcttgtatacacacccagacacctgttaggattgtcaccctaacacctggatacagaccattggtgaggtcttgtgtctcacatgcagatgcaatccacagtttgattcctgactgtcaaatgtaaacacctgtccaaagttgggatggtgactcatttctaaacccagctcatagacaagtgaggactcttctgtctggcccagttaatccgagaaatattaacttttctacctgggcttagggagcagcataaaggtctcggggcaaattgtggctctcattcctagtctacaatgatcttgggtagtattaaatgtcctaacggggttcagcgcacaggtgagattgtgacagtgatatccacacccaactgacagtaaaacttgccatctttcctcatggatacagcccactgttgaggtgttgaatctcataaccaaaggcagttgaaaattaaaacattgtctctcattggtagacccagtccacaggggggttggtgactctcagaccaaaattcagcacagttatgaggtcgtcactccactaagaaaacggaattcccagaacaaattgagactgtcatgcacaaatccagcccaccactgagattgtgactcatttacttagacccaacatataggaagtgttgactcttatacctagaattgggacatgtgtaagattgttcatcttttcctcagactttcctgcaggagtgatgctgacatgttcctctatttggcatctgagtgatatgactcttgccatggtctagcccacagatggaattgtgatgtgttgctgtacccagcacctaggtgatgtaactccatttttctgccttggcattgctcacaaaaggtattttgacatatctctggggtatgtacccaggtttcatgactctcttgcctgtgccctgtccacaaattgtcatgaaatattgctgggtccaacacccagggatgtaactctcatgcctaggccctgccaacagggggaattgtgacaaatctgtgtcaataacccaggttatgtgactctctttttttgcctggtccctgctcacagagggcattatgacatattgctgaactcagcacctaactgatgtgattctcctttctagtttttgcccacaggggagattgtgacatatcactgggcctcaaactaaggtgaagttacactttcattttcgaactgtactcagaaggcatcgtgacatattcctgggcccagcaccaaggtgatgtgagtctcctgcctgcactttgcccacaaatggcattgtaacatatctttagacctatcaactacttgatatgacttatttttttaaagtgaaagcaagtttattagagaagtaaataaacaaaagaatggctactccatagacagagaagacctcagggctgctcattggctcttttcatggttatttcttgagtacatactaaacaagggatggattatttgtgagttttccagggaaaggatgggcaatttccagaactcagggtgccttccctttttagaccatataggataccttcctaacattgccatgacatttgtaaagtgtcatggtgctgttgggagtgtcttttagcatactgatgcattacatttagtgtataatgagcagtgaggactaacagaggtcactttcattgcagtttttctttcggtgggtttttgctgtcttttgtcctgtatcctcttttatcagcaaggtgtttgtgaatggtaccttgtggtgacctcttgtcttatcctgtgacatagaatgcctgatcttctgagagcacaggaattgggttaattcctttctttttgaggtctccagataactcggggctcttgggcctggcagaaagtgacactccttacttgcacaggtcaggacccctgcgcagggactgtgtagacaaggaagaaggccaattttcccaaagggcttctactagctctacaaatcaagtatgatttctcaaagaccatgattccagtcaaagccttggtaaaataacctgtgtctcccattgtgtcctgttgcaagtgaaaacatgtttattgtacttatgcaaataactatattgccataaatcaagaatattcaccaatatctttgcacattctggacaaatcagggaaagagaaacaaaatactccaaattatgtttacaggagtatatgttactcaattgttaaaagctgtaaataactcaaaagtgctcttgactctgaaaaacaaaggatccacaacattttaagcaaaaagccaaaaaatattacttccatcttttattagttcagttcatgcagtaaactcttgttctgcttgatatttattaatatttcagctttccatgagagtcttgaaagtttttcccctgttctaattttgcagtcttcaaagttatcagaaatttgcatttgaaagcacccatcaatgttccagagcagactataaattatcttttgaaaaggattaaaacaagacaacaattgtctgtgggtgacaaaaaaagtcctaggacagccattattaaagccacagttaactagaaatattggttactcttgtggaataaacaattttacataacaattataactattaacaacatactatacactaagttatatcagacttacaggagttttccataatttcagaacactcactaatgacatatttatacaaatacaaccccaagaaagccaaataccatttcatatttgacaatacattctgtataattttataccaaataaatcgaatatattatttttggactttaggtgacctaatatctaaaagattaattaggtcagaaaagatgaaatgtataatttaattttggaaagtttttcaaataacaaaggtttaaaatattttacattataaaatcaaatcccagttcaccctatgtcattcatttagccaaaacagtaacttttctttttaaaatttttttaaaagccaaaaacttttacttactaataaaggaaagacatagctttccaaacagtctgtctcttgtctttcttcctgtactttattcaaaagacaaacaaaaatctttcattttttaaatacaacatgaaaatctggttcaagagtggaagcctatatttcacctttgtgttagtatagtaatgatgccaaagttcttaataaaatcttatatacaacatatcaaagcttaattagtttgactataaggtaagattctcagaaatcttttacaaccctttaaaatttttgttaaacggcaaatctgtgctctaaaaaaaacctgttgagcttttattccaatgttcaatttatggaaaaactgaatatctatttaactttagccagtatgttcacacacagaatttttttatgagattaaatttttaaaaaccttccacaacttgctcaaaccttcaggtttattctaacttaaaacaaccctttagatctctaaccgaggccccaatattaacattcttatgcctttttataatcttatactgaaagcacattctatttttcttacacaccttgcatgtaaagctgtttttatttcccaaagattacttatgtcacatgaactaaaaggcattcacacatggacacagtgcactggtgaggtcttcaacctcatatgcggatgcagttcagttggaattgtgactgtcatatgtgaacatccagccacaattgggatggtgactcatttctaaacccagcacatagacagttgagaaacttctatctggaccaaatctactgaagagatgttgactctcatgaatgagcttagggtcacaggtacaatcatgggtgcatgctagcacgaaggtctcagagcagattttgactctcatgcataccatataaataccttgaatggtagagagagtgtccccacaaggcccaacacacaggtaacattgtgattatcccatgcacaggtggctaatagtaaagactgtcattcttccacatgaatacagcccactgttgaggttctgaatctcccacccagaggcagtggaaagttggagaattaactctcatacatggatctgatccatagacgagttggtgactctcagactaagactcccaacaacagtgaggttgtgacttcactaagggaacacagttttcaggagagatttagtctcttgtgtacaaattcagtcccctgttgagattgtgactcacatgcttagcccaaacctacaggtgttgactctcatacctggaactggaaagtgtgtgggattaatctcatccctggaccttcctataggtgtgaatctgatatatgcctctgcccagaatctgagtgattctcctgcctgggtccagccttcagcagagatcatgacatatcacttggtgcagcacttagctgatgtaacctattctcctgccttggctctgcccatagaaggcattgtgatgtattgccaggccctgcacccaggttatgtgatttctgcctgtgccctgaccacattggctattttgacatattgcactgtccaacaccaggtgatgttacttttccacctgcgcccttccaacagcggacattataaactgtctctgtgcccatcacttatgtgttctgactttcttctcctgcatggtttctgctcacaggaggaattgggacatatcccagggctcagcacccagttgatgtgactcttcttttttttctatgttctgctcacacaaaagatattgacctattgctgggcccaacaccaaggtgatattactctttcactttagccctaccctcagaaggcatggtgacatattgctgggcccaacgcaaaagagatttgagtcctttgcctggaccctgcttacaagggggcattgtgatatatctctgggcccatagactatttgatctgagtctcctctctttcctgggctttacctagagtaggcattgtgatatatctctgggctctgcacccagctaatttgacttgcctcttctgtctgggccatgactacaggtaagagtgacttatcaggacccagcacacaagtgatgtggttcttctgcctgctctctgcccacaggcatcattgatacatatctgtggtcccaaaatatagataatgtgactctttttttgggtgggaagggacatgtccacagtggggattttgacataatgcttggcacagcatttatgttatttgactctcctcttatggttaggctctacccactggggtaattgtgacatatatctgggtgcagcccctaggttttatggctatcctcttttccatgatccctactcatagcatacattgtgacatatctctgattttctcacctaggttatgtgactttcttgtctttgcccttccattagagggtattgtgacatattgctaggtccattatgtaggtgatgtgactcttcacctgtcccttcacccaaaaggtgaagagagacattgtgaaacatctctgagccaatttcctacataatgtgcctcttctctgctgcctgagaaatgcccccaaaggggattgtgacatatctctgggcccagcacctgaatgttgtgactctcctgcctggactctacctagagaaaatattatgatatgtcacttggccctgcacacaaatgatgttactctcctgcctgggccttacttatagaggggattgagatattttccaggtgaagaattcaggtgatgtcactctcatttctcagcctttctcacaggtaagattgtgacatattactcagcccagcacacagatgaaatttttcctcttgtatgcaaacccagccaacagttgctattgtcaccataacacatgaataaagaccactgttgaggtcctgaatcttatatgtgaacacatcaacagttggaattgtgactgtcttatgtatttctcaccagaagtgggatagtgactcatttctggattcagctcacaggaatggtgataactctcatacctggacgaagccagtaagagagatgttgactctggtagctatgcttaggggtctgggtcttttacttgtaagaaggtaacagaagattatgacacttacacatacggtataaagcttttgggcaatacagagtgccattacagggcccagtccacaggtgagattgtaactctcctatacacacctagccaacagtttgaattgccaccctcacacatagaccgagcccattggtgaggtcctgaatctcacacatgaacctattccaccattgaaattatactgtccggccatggtggccgcgggtggtggttggcgcggctgcgctgcggcccagggcagtgcggagccgggacagtcgcggcgctgacgcccgcgggccccagctgcagatatgaagcggagctgctgccgcgaccgaccgcagcagctgccgcccgaccgccgggaggatggagttcagtgggcagcggagctgtctcagtctttgccgccgcgccggcgagcgccgcccgggaggcagcggctggaggagcggacgggcccacggggcccgagggcaaggagcagccgcctgccttggcctcccaaagtgccgagattgcagcctctgtccggccgccaccccgtctgggaagtgaggagtgtctctgcctggccgcccatcgtctgggatgtgaggagcccctctgcctggctgcccagtctggaaagtgaggagcgtctccgcccggccgccatcccatctaggaagtgaggagcgcctcttcccagccgccatcacatctaggaagtgaggagcgtctctgcccggccgcccatcgtctgagatgtggggagcgcctctgccccgccgccccatctgggatgtgaggagcgcctctgcccggccgagaccccgtctgggaggtgaggagcgtctctgcccggccgccccgtctgagaagtgaggagaccctctgcctggcaaccaccccgtctgagaagtgaggagcccctccgcctggcagctgccccgtctgagaagtgaggagcctctccgcccggcagccaccccatctgggaagtgaggagcgtctccgcccggcagccaccccgtccgggagggaggtgggggggggggtcagcccccggcccggccagccgccccatccgggagggaggtgggggggtcagccccctgcctggccagccgtgccgtccgggagggaggtgggggggtcagcccccccccggccagacgccccctccgggaggtgaggggcgcctctgcccggccgcccctactgggaagtgaggagccccacagcccggccagccaccccgtccgggagggagatgggggggtcagcccccccacccggccagccgccccgtctgggagggaggtgggggggtcagccccccgcctggccagccgccccgtccgggagggaggtgggggggtcagccctccgcccggccagccgccccgtctgggaggtgaggggcgcctctgcccagccgcccctactgggaagtgaggagcccctctgcccggccagctgccccgtccgggagggaggttggggggtcagccccccgcccggccagccgccctgtccgggagggaggtgggggtgtcggccccccgcccggccagccgccccgtccgggagggaggtgggggggtcggccccccgcccggccagccgccccgtccgggagggaggtgggggggggtcagcccccccgcccggccagccgccccgtccgggaggtgaggggcgcctctgcccggccgcccctactgggaagtgaggagccccacaccccggccagccaccccgtccaggagggaggtgggggtgtcagcccccgcccggccagccgccccgtccgggaaggaggtggggggggtcagcccccctgcccggccagccgccccgtccgggagggaggtggggggtcagccccccgcccggccagccgccccgtccgggagggaggtggaggggtgtcagcccccccgcccggccagctgccccgtccgggaggtgaggggcgcctctgcccggccgcccatactgggaagtgaggagcccctctgcccggccagccgccccgtccgggagggaggcggggggggtcagcccccctgcccggccagccgccccgtctgggaggtgaggggtgcctctgcccggccgcccctactgggaagtgaggagcccctctgcccggccagccgccccatccgggagggaggttggggggtcagccccccacccggccagccgccccatccgggaggtgaggggcgcctctgcccggccgcccctactgggaagtgaggagcccctctgcccggccagccgccccgtccgggagggaggtgggggtgtcagcccccgcccggccagccgccccgtccgggagggaggtgggggggtcggccccccgtccggccagccgccccgtccgggagggaggtggggggggtcagcccccctgcccggccagccgccccgtccgggaggtgaggggcgcctctgcccggccgcccctactgggaagtgaggagcccctctgcccggccagccgccccgtccgggagggaggtgggggtgtcagccccccgcccggccagccgccccgtccgggagggaggtgggggggggtcagcccccccgcccggccagccgccccgtccgggaggtgaggggcgcctctgcccggccgcccctactgggaagtgaggagccccacagcccggccagccaccccgtccaggagggaggtgggggtgtcagcccccgcccggccagccgccccgtccgggagggaggtggggggggtcagcccccctgcccggccagccgccccgtccgggagggaggtgggggggtcagccccccgcccggccagccgccccgtccgggagggaggtggaggggtgtcagcccccgcccggccagccgccccgtccgggagggaggtgggggggtgtcagcccccgcccggccagccgccccgtccgggaggtgaggggcgcctctgcccggccgcccctactgggaagtgaggagcccctctgcccggccacgaccccgtctgggaggtgtgcccaacagctcattgagaacgggccaggatgacaatggcggctttgtggaatagaaaggcgggaaaggtggggaaaagattgagaaatcggatggttgctgtgtctgtgtagaaagaagtagacatgggagacttttcattttgttctgcactaagaaaaattcctctgccttgggatcctgttgatctgtgaccttacccccaaccctgtgctctctgaaacatgtgctgtgtccactcagggttaaatggattaagggcggtgcaagatgtgctttgttaaacagatgcttgaaggcagcatgctcgttaagagtcatcaccaatccctaatctcaagtaatcagggacacaaacactgtggaaggccgcagggtcctctgcctaggaaaaccagagacctttgttcacttgtttatctactgaccttccctccactattgtcccatgaccctgccaaatccccctctgtgagatacacccaagaattatcaataaaaaaataaattaaaaaaaaaaaaaaagaaattatactgtcatatatggattcagccacaggttgaatggtgacaaatttctgaactcaactcacttgcacaatgaacccagccaatagaagatgtgttgactcttaggcttagggcaagaggcaaggttttgggtttctcacttgtttgaaggtcacaaaaaattatcaaactcactcatattgtataatgccctcacattgtacagagagtgtcattacataactcagcacaaagtggagattgtgactctcaaatgcacgcccagccaagaataagaattgtgatccacacacacagacagaacccactggtgaggtcttgaatctcactctcagatgagtccacagtttgaatttttaatgtcatgtgtggatccagccacaggtaagagggtgactcatttctgaacccatctaagagacacagtcatgattttcatacctggacccagccaatatgagaggtgttgactctcatacctggacttaggaaaagaggcaagatcatgagtttatacagcactaatgtctcagaggggattgtgactctcacccaaacaatgtaaagccctgtggagttaaagagagtgtcataagaggacccagaacacaactgaaattgtgattcttatatgcacttccagcccacagtaaaaagtgtcaccctcccacatgaatacagaccactgttgagcttctgaattgtacatctggatgcagttgaaaagtggaattctaattctcatttgtggattttgtccacaggtagatgatgacactaggatcagggttcatcacaccggtgaggctttgattctgatagcaggacatggtctgcaggtggaattgggactcttatgcatggattcagtccatcattgagattgtgactcatgtacttgcatgcaatgcacaggaggtgttgactctcctacctgaagctgggacacgtgtggaattgtgcatcttagccctggaccttccacaagtgttgttgtgacatatacttttgcttagcacctgagtaattttactcccctgcctgggcccagccctcagaggggattgtgacagatacctgggtcaaacacctaggtgatgtgactctcatgcttgagccctacccacagagggtgctgtagaatatcactgggctcagcacttaggtcatgtgactcttattttcagccagggccctgcccacagagccattgtgagatatcactgagctcagcacctccgtgatgtgactgtacggcctgtgccctgcccacagtaggtattgtgacttacctctgaactcattacctaggtgatgtgactttcctcttttgcctgcattctgccccttgaaaatggactgtgacataccatttaggtgatatgattctattcttctgcctgagctctggccataggggagattgaatcattttactgagcccagattgcaagtgatgtgaccctctatcctaggccctgcccacaggaggtatcgtgatttatctctgtggccataatttaggtgctgtgactcttctattctctctaggccatgccagttgagggggattgtgacttttctattctctctaggtcatgccaattgagggggatttggaccagcacaaaggtaattaaaaactcctgcctaggccattctcatagaaggcattgtgacatatcactggtcacagcacacaggtaatttaactctccttcctgggccctgcccataggggatactgtaacatatctttagcccagcacttaaaatatgtgactctcaaatggtatttctagttctagatccctgaggaatcaccacactgacttccacaatggttgaactagtttacagtcccaccaacagtgtaaaagtgttcctatttctccatatcctctccagcacctgttgtttcctgactttttaatgatcgccattctaactggtgtgagatggtatctcattgtggttttgatttgcatttctctgatggccagtaaaggattataaatcatgctgctataaagacacatgcacacgtatgtttattgtggcactattcacaatagcaaagacttggaaccaacccaaatgtccaacaatgatagactggattaagaaaatgtggcacatacacaccatggaatactatgcagccattaaaaatgatgagttcatgtcctttgtagggacatggatgaagctggaaacatcattctcagcaaactatcgcaaggacaaaaaaccaaacactgcatgttctcactcataggtgggaattgaacaatgagaacacatggacacaggaaggggaacatcacacaccggggactgttgtggggtgggaggatgggggagggatagcattagaagatacacctaatgctaaatgacgagttaatgggtgcagcacaccaacatggcacatgtatacatatgtaacaaacctgcacattgtgcacatgtaccctaaaacttaaagtataataataataataaaaaaaatgtgactctcctagctggtttcttttccacaggtgagaatttcacatataactgcacccagcacacaggtgaaattgtgacttttgtatgctcatccagccaacagttatgagtgtcattgtctcatatggacagagaacactggtgaggtcctgaatcttgtacacggacatagtccacagttggaattttgactgtcatgtgtagatccagccacaggtgtgatgttgacctgtttatggagttagctcacaggcacagtgagaactctcatatcttgacccaaccaataaaagagatgttgactcttatagctaggcttaaggaaaccaatagggtcctgggtctcctacctgtatgaaagtcacagaagattatgacactcatgcatattgtataaatccctctgggtggtacagagattcattatagggcccagcacacaggtgagattgtgactttgttatgcagacaccgctgacagtaccatcaccctcccatataaacagagcccactggtgaggtcctaaatttcacaaactgacacagttcacagttgggattgtgactgtgatatttaaatctgatcacagatgagaagatgactcacttctggatccagcttagaaaacagtgatggctctttcacctggactcagctaaatggagagatgttgactctgttaactaggtttaggggagcacataatgttctgggtctcctgcttgcataagggtagcagaggattatgacactatacatattgtacaaagtcccccattggtcctgagagggtcattacagggtctggcacacaggtgagactgtgactctgatatgcacacaggcagagtaaggattgtcagcctcctacatggacacagcccactgttgagattctgaatctcacaaccagaagcagtcaaaagttggaattgtgactctcataggtggatgtggtccacagctgagatgatgacctcagaccaggaggcagcacacctggaggctgtgactcctctaccgagatgcagtctgcgggtgtgattgtggctgtcatgcacaaatccagtccacctttgagactgtgactcacttactgagacccaattcacaggaggagttcactctgatacatagagctgggacatgtgtgggattgtaaatcttatcacttaacctttctgcaggtgtgattgtgatatatagctttgcccagcacctgagtaatttaactctcttgtctgagcctggcatacagttaggatcttaacatatacctgggccaagcacctaggtagtgtgacttttttttgggccctgccctcagggataattgttacttatcactaagttcagaacctagtgatgtgacatttctctactgtcttggccctacccacaaaacaaaattacatcactgggcccagcacctaggtaatgtgcctctactctttttcctgggccctgttcatggtgggccttgtgtcacatacatgagccctgctggaaagcatgatgatgattctcatacataaacccagccaaaagatgtgattttttactcacatagtgaggcatagggcaacaaataaggtcttgtgtcccttacttgtacaaaggtcacagaacattataagcccaccgatatgtcatatagtcctaagagagtacagagagtgctgatacaaggcccacttgaagatgagattgtgactctcctatgcacacctcactgaccattagaatcaccacattcaaacatggagagagcccactggtgacctaaattttacatgccgatgcagtctgcagttagagttgtaactgtcatatatgcatttggccacaggtaggatggtgattcattattggacccagctcacaggcatgatgatgaatcttgtatctggaatcagcaaaaaaaaaaaaagatatattaattcacatagctaggcttagggcaaatggtaaggtcctggttcccctacttgtacgaaggtcacagaggattactacacatgcttataatataaaggccttgggtggcacagagagtgtcacagcaggacccagcacacaggtgagattgtggctctcttaaacacacccagccagcagttaggattgtcaccctcaaacaggaacagagcctactggtgaggtctagaatctaaagtggaaacacggtccacagttggaattatgaatgtcatatgtggatctggccacaagttaggtgttgacacatttttgaacccagctcacagtcacagggatgactctcatacctggacccagacaacagaagatatgttgactctcaggcttagggcaatgggtaagatcatgagcttatatcagcactaaggtcttacaggaaatttcaattcttatgcatcctgcataaagccctggggtggtatagattgtgtcataacagggctcaggacaagtgggattgagacccttgtatgcacacgcacccaagagtaagaactgtcaccctctcacatggacacagcccactgttgaggctctgaatcttacattcaggggtattcagaagttggaattgtgattctcataggtggatttgattcacaggtaggttggtgacgggtaggatagttaggattgtatcttcaggccaaaatttatcacacctatgaggcagtgactgaccccactgaaacactgtccagagttggggttggctttctcaggcactgatccagtccatggttaaaaatgtgattcacattcttgaacacaactcacaggagttgactctcatacctcaagctgggacaagtgcgagattgtaaatcttatatctggaccttcccacagggtgattgttacatgtatctttgtcagagaactgatgaattttgctgtcctgcagaagcccattctatagttgagattttgacatacaccttggccaagtaccaagaatatgtgatgctcctgcctgggcgctgccctcaagggggattgtgacatatctccgggccatatgttgtaggttatgtgcctctccaatcctgcttaggctgttcccaaaaaaggcattgcgacatgcctgaacccatcacctaggtgatttgactcttttttttcccctgggccctgccctcagtggggattgtgacatatcactgggtccatcatttccgtgatatgacttttgtgttctgctttgactctgcttgcaggaggattgtgacatataactaggcccagcacctgggtgatgtgactctcatttcctgcctgtattcttccacagaatagattgtgacatatagctgggccaagcacccaggtgatgtgactcctgcgtacagtggccatttttgacacatcttcctgggtcctgtttatgagtggaattgtgacatatctttggccaagcaccaaagtgatgtgactgtctgatttctgctcacaggagctattgtgacatatatctaggccaagtttagaggtgtgtgtaatgatagccctcctatatggacccagtcaataggggagatttggcttctgttttctaggcttagggcaatggataaggttctgggtgaaaaagcataaagttctgggtgaggaaaggtcacaaaagattatgacactcaagcatattctctaaagcccttgtgtgacatttagagtttagttacaggatccagtacccaggtgaaattattactctcgtaggcaaacccagctgacaattaggattgtcaccctcacacatggacagagtccactggtgaggtcctgaatcttacaggcacagtccacaattggatttgtgcctttcatatgtgtcctgggatagctgatatggtgacttatttttggaggtggcttacaagcactgtgatgactgtcataaatatatctgaccaataagagagatgttgacacatacctggtaatagatcattggttcataccagcatgaaggtctcaaagcagattgtgactgttactcacaccatataaagcccttggttagtacagagtgtgtcataacaggtcccaggacacaggtgaaattgtgactttcttatgcacactcagccaacagtaaacattgtcaccctcccacatggaaaccgtccactgttgaggctgtgaacctcacatgtgcaggtagttgaaagttggaattttgactctcatgaatacatctggtccacaggtaagatagtgactcaaagaccaggattcagcatgcctgtgaggctgtgactcatatactgaaaaatttgtgtttagaattgtggctctcatgcaggcatacagtccgctattaagactgtgactcatgaacttatacccaactcacaggaggtcttgactctcatacctggagccagaaaatgtgtgaaagtttaaattttatatctggacctttttgctggtgtgattgtgacatatacctttgtccagcgcttgaattatttgaccctcctgctggggaaaagcccacaaatggaattgtgacatatacctgagcccatcatgtaagttattttactctcctgcataggtcttcaggggagattgtgatacatcactgggcccatcacctaggttaaatgattatcttcttttgcctgggccctgccaacaccaagagttgtggcatataactggacacatcacttaagtaatgtgactctacttttccacctgggccctgcctcagtgtgggttgtgatatatcactgagccctgcactcaaatgatatgactctcctgccttggcccttccaatatgaggcattgtgacatatcaggggcccatcaactaggtattatgactctccttttctgcttgggccctgtacacagggtggattgtgacatattactgtgccctgtacacaggtaatgtaacttttctgcctgaaccctgcccacaggtggcattgtgacatactattaggcccagttcccaggttatgtgattttactgccatggccctgcccagagagtggatattgacatttttttggtccagcattcaggtgatctgattatcttgcctcttcccttctcacaggttaaatttcaacctatgttttttttcccagctcacaggcattatgaccatgctcatatagaaaaccagccactaggagtgattttgactctgttagctagactttgagtagtgggtaaagtcctaagtctcctacatttagaaggataacagaagttgatgaaatgtatgcatattctataaatactttgagtaatacagacagtataataagggcccagcacatagtgagattgtgactctcataggcataccaagccaacaattagggtcatcacttccaaacatgaaagtagcacactggtgaggtcctgaacctcacatgcaggtgcagtccacagttaaaattctgattgtcatatgtggatctgagaacaggttgaatagtgactgatttccagactcagctcagaggcacagtgatgactcgcatacccggatctagccaatacgagatatgttgactctcataggtagccttaaagcaatgggtaaggttctgggccttctacttgtatgaaggtcacagaactcacgcatattgtacgaccccttgggtggtacagagaatgtcataacagatcccagcacaaacttaaaattgtgattcttataggcatacccagccaacggtgagggttgtccctcttacacatcaacagagaccactggtgaggtcctgcacatggcatgtggatgcagtccatggttcacattgtattgttcacacttgtccgtcactgggtgctgggttcatagtatatgcattttgtaaaaacttataaagctgttattttataatatatgtgctttttatgggtgtaaaattaaaaacataatttttgatttttctatttatctcatgtttcttccacaatcaatttttgtcacatactttcctggaaaatagataatttcatctaaattttcaagtttaatgtcatgacatttaaaaaaatattatgtttgaatcttgaatgtatatctaaatatcttcttttatcttttgtaaaatttttactcctcttgaaatagtttatctactttattattgcattcaaagaacagcactaattttattcacgttattatccctgagtaacaaatgagtcagagaagtcgagaaacttgcccaaggttacacaggtactctgagcctgctcttctaaccattgaacacacggtgtcatccaggaaacacacatgcaatactatttctaaaggtccataaaatcacatatacacatgcaaatatgtgtaaagataaaatgaacttatacagtgtttacctgcagaaaagtcactggttgaaagtgtagaaggtcacatagaagaagccttctctgtttttattgttttgttgttttgtagagataaggtcttgttatattgtctaggctgatctcaatttcctcggctaaagcagtcctcctgcttcagactcccaaagtgctctctgccatatttttaaaagtacttattgggtcaagtgtgctggctcatgcctgtaatcacaacattttgggaggccagggggaaaagattgtttgagttcaggagtttaagacaagcctgggcaacatagtgagacctcatctctactaaaaatagaaaaatatagctaggcacggtggctcacacctgtgatgtcatcactttgtaaggctttttcttccatgattaaaaacaaatcttggtatctggcagccgggcacagccaggtaaggtgaggacaggaggcagaaacttgcaatccatgggctacattggctttttgatttttttttctccccaactacacagaaaatttcttcagtgtttgatcttatgcatctttgaatccaaacatctcattctttgccttatacatattaaaatgtattcacagttcataaacataatctataaaaaatattctaaacaaaaaccttctctttatagaacctagtaatgcaccttaattccttacaatttgtgttaagaattactagtctaatgatgttttctaacatgtattaagtacttttagatgtttagcacatgtgatatattataaaaacctcaaaattaacctgggactccaaagaatatgtatggcccaaacagttgttttcttcccaacaccaaggaatggcatacaaggctgtcttcaagttgaggacaggtcataaagacaaataaaaaaaagagaaaaaaatgtctgcaaacttgtttctacacatgggtcttacatgcatttctccatcaattatattaattctgaatgaactaaattacctgaagtggtacaaataattccttcaaattgtagaatccccaggaaacagaaagaagcaaaagcaaactctcccaaagaaagtcacatctattctggaccttgatgaaacttgcaaacaattttccattatgtgcaatgactagcaagcaatcaaatatgacaaagttcacaataaataacatcatgtgaaagacaccagagaaaaacataacagaaacaaatctgcaaagacatccaatattagaattatcagacacaaagaataaaaaacaactatgcttaccatatctaaaaaagacaaatgaaagtatctgcaggaaagaagaaactatataaagattctaaaaatgagttgtaaaatgaataatacagtaactaaaaaactcactacatttgaacttatgtgtacaagacagaaccagtaaactagatgctagatcagtagaaattaacacatatgctacaaatatcagtctcagaaaaatgtctggtaagtattccaagcattcaaaatttaaaactgaaaagcatgaggttgatagtacttaacctttctcaaaaatagaataggtaaaaacactgcacaactcaattcctgagtttatgtcaaagcttgacagagacaaaacaaggacaactataaacaatctcattcacaaagacaaattttttttttgagactgtgtctcactctgttgcccaggctggagtgcaatggcccaatctcagctcactgcaacctccacctcctgggttcaagcaattctcctgcctcaccctcctgagtagctgggattacaggcacatgccagcatgcccggctaatttttgtatttttagtagagacacggttttaccatgttggtcagtctggtctcaacctcctgacctcatgatctgccagccttggcctcccaaagtgctgggattacaggcatgaaccaccgcacccagccaagacaaaaattttttaaaccaattacaaataaagtgactctttctctgtataaaatgaataaaaccaacaataagtttatcttaagagtacaggataagttgaacattgtataatctacatgtctacataaaataggcacacaataagagcttggtaacataactagaaaaaaagaatgctttattttctaaatatacaaggtatttgaagtaaagtacagcaaatgtacataataaactactgaaatcttgtctttcaatgtcataaacaataattatgctggtattcaagatttttattaaacattgcatccatggtttcagccaacaggttaaaatgagaaatcagttacacaattatactggcaaagcggaactagtcaataaactaatagctaacctattggttctacctaggtagattggatccttacaaagcaactaacacaaaaattgtccatatatattgaggatttaaaacttctaggagaggcccggcggggtggctcatgcctgtaattctagcactttgggaagccgaggtggcagatcatgaggtggggagttcgagaacagcctggtcaatatggtgaaaccctgtctctactaataatacaaaaattagccgggagtagtggtgcacgccttgggaggctgaagcagaagaatcgcttgaacctgggtggtggaggttgaagtgagccgagatcactccactgcattccagcctgggtgacagagcgagactctgtctcaaaaacacaaaacaaaacagaacacaaaataaaacttctaggagaacatgaagaagaatattgttattataactgtggggaaaaaaacttcttagacattgcacaatataaaaattatgcataggctgggagtggtggcttgtgcctgtaatcccagcattctttgaggcccaggcaggcagatcacttcaagccgggagttccagaccagccagaccaacatagtaaaaccccatctcaatttaaaacacaaaaatcagcagggtgtgctgcgcatgtttgttatcccagctattcaggaggctgaggcatgaggagcacttgaacccaggaggcaaagattgcagtgagctgagattgcaccattgcactccaccctgggtgatagagtgagactttatctaaaaaaaaaaaaaaaaaccattaaaatatttgtgaattagactataccaattttaagaatttttgattaccaaaaacataaaacatgttttaataaagatggtgaaaagccaaaccataactgggggaaaatagtttaaaaacacatagtacaaaaaattagtatttagaaaatatatattacagaatgtgtatgaataaacaaggaaatggaaaacattaaaaataggacagatggcaagtcttaaagcactaactgatgaaaaatgctaacttcattagtaactatggaataaaagtataaataatgtgtttctaattaaccattttgtcaaaaaattatgtctagcaattccaagagttggtaaaagatatgtactagtaataagtgtagatacatcaaatgaaaaatggtaattgagaatgtcactttcaatgtttgagtatttggacttttggtttaaaaaagtgtaataaaatagagcttttggtaagctttctgtagcttaacattatcataattaggaaaaaacaactttaaaaatgtaaataaacaaaaaagcctacaccaaaataaaacaacaactaagacatattgatccttgttttgggagagtatgaaacagaccattgtgtgaactttatacagttattttgccacactggcatagtaataaaaattatttatattcaatttgaatgaacatgtccacatcttaaaaatactgctttgtactatgaataataaatgtaaaagtctttatactcaagaggatcctgattctcaactaaacatatatggcaacccgttcctctgtttcttcaaaactgaagcctgattaaggcttaaacatggagtgagagggattcataacagaacatgtgaaacaaaaaaacatgagataggatggtcatttctaagaatcagcaattgcctgggggacctcaatataatgatatcaaatatgaatcttactggataaaaataaacacaaaaagctgaaaacaccatgactttaatttggtggaatagagtctctggaattatgcagagttgtgctaaaaatattgagccagaatgatatgtatctaaggattattaaagggaatatttacaaacacattagtatttgttctatatcttgttagagtagcagtactcttgtctgtaatgtcagcttccccaagctacagatgccattgacaaactaagcaagtgtctaaaatgttgtttggagttagtttctaaatttaagaaacttccaataattttatgaatttcattgaactctgtttcatgtataaatctcaccaaaaggcactattcggtacctatttccattagtcttttctgggattttctgttgcttgtttccaaaccaaccttatttgaatcctagtcatttctaaagccccacatgtaataatagaaagagagcagaaatgaagccaagttatcccaaacagtccatgcctaatatattttgttccccaaatgaaccaaaaaccacacaagctacacaacagtggatttaaaattcaacctaaattcaacagtagttgtcaaaatcatatgcaaaaattagcaaagtcacaatgtagaaacccttaacctgttattccacaacaaatcatcaaattcttattttggcatttttagaaaaaataattacattacatatgacaaaatatacccactcacttataataaaatattttgaaatacatacggttttattcttattcttgaatatatattatttagacaagactttcagtaaaaaatacttatagctaccgtgtatgaattaaaacagctatgggaagataggatttttagttaataatgaagattgaagctccaatgatgtaaagtattgtttcctgggcacacagctaattacccaaatcaagctgaaatatgcttgatttaaaaattttaattttcccactgttgacaatattgacataacagctaaatcttagtctcagagctggtagtttggaataaattaagacaagtactattgaggaaggatgggtagtcaagaaagtgactatgtctttgggatgcagcaaacatggccactgtacagtggctgcatattgccaacacaataagccccagcattcacattgtattccagcttattcaagcaaagctctctccaatagagaaaatcccctgtaaagagcatgaagattttgattttacctttcctcaaactgacattttactcattgtaatagtaaaaagcaaacctgtgagtggagatttaagatgctagtgagatgtgaaaaatgaacaagcatgtacagctactgtgtccgtgcatcaagagggccatccagaacatgcttactaataacaccactttccacctctttataaataattatataagactcccataaaaaagtccctagtttcagtctttgctttctcattcttgtaagcaacccaccctgaatcctttctctctcaaggtgtactgggtattctgcacctaacttttaaaatagtcttactcctttgcaataaattactctatgctgcatcttctttgttgtttgtctcttgtttaaatttttttgaagctaagacaactgaggtttcataaaagccattaaacactatcatgctttgttttgtattttttattgtcaaaaattttttctctgatatgtcaatattcacattttaaacacagtcaacactgctaaattgaaaatttaaatgaccacaaaataatttatcataaaagcatgtatatctctcatgtttcaccttcaccacactttctatctattcaactttttaaaaaatttgacggtcaaatacatacatcaaatttaatattttatttaataatatgaattcaattccaaaatgatttatatggaagtatattgttatatttacttttgaccaaatttggctttccaaactaaggtaaaactaaagcatattttcaaagttttaaggaacttaaccttactagcattgagagaagctagctagcatgccttaggtagatagcaagggaagggtttatggagagctcccaacccacaggttagtgccttatccccacataacataaaaatcagcttggaaaaaaaaaataagctccaggcactattaagggaactagcatagggggttgtgcctagactcatgccctcggatgcacaagtaggagaacctaaagcccatttagataaaaatttgcacacacctctggcttacttagaagggaacaaggcctgacatagaaatgtctttgctgtttgtataatcagtgggatcccagaaaaaagttttttctttttattgtgggcgtgaacgcagtgggctttgatgggttctgtggacactttcttttctgtgagtctggtctttataaattattacttcagcccttgattggtcatgggcaaaggtcttaggccaagctctggcttcagcttctaataggttctgggccaacctgagcagcctttatgaatcattacttcagcccctgattggtcccaggccaaggccccaggccaagctgagtcacacattctctaagacagctcataaactaagcacaattttttcccattccagtttataaaaaccctggatcccagccttatagtgggcaacccattgaggcctccctctctgctggagtagggctttcttctctttgcacattaaacttttgctccaacctcacccttgtgtccacattcctaaatcttcttgaatgtagcacaaagaattctgggtattatctcaaacaacagaggttgttacaccttggttcattggcaaaactacaacatattttggtgtgttggccagggagaaaggaattcatcagaagggtgattaggagtgaggctacttgtcctcagttactttctgaggcttcttgtcctaagtttctttttctcaaaaacagctttgaaaacattggctctgttctaatccagtttcctttaatgaagggcctactcattgtgtggaattgaaaggaggtcctagggcaactgaaggttcctggctgagtctatacttcagtgttacctaaaaacccttggactaactccagtccccaacagccaatgagggcgttggcatgagaacttctagtcttttttttcatttcattttcttcttcttttttttgtggctatcatttctcctatccattctttgtatgcaatgttgtgaacgtttttacagcctatggatataatcatactgagtaaagtcagtcagtgtcttagtaatcagatatgtaactcagagttgttgttttgtaatttcctatcaacagggagatttcaaagtctctctctaaatttttacttagtaagggcctttctgtcccccagtaataaacattcatggcactgtatgagagaatatttcaccctgagtaaataccctcctttgcatttggtttgttttttttctctccatgtgaacctcagcattgtccaaggaatctaaacagttcctttatgagacaagttcattttttgttctggagcatatgctataggaacagcctatcaaaccacaaaagtctttctaacttttgcctaaaaatataaagttggagtttttacctagcatttctaattttacagcacccctagttgaatgggattgttctccatgggaagatttgtcaacgctctgtccaaaacttacagttccccaattattttcccttttacatgcctttatcagtgataaggcctcatgccctatttgtaaacagaagaactcaacttctgacagacggaagaaagccatgctaacaaaacaaatcttcaatttttacacatttttaaggcacctgttcctcctcaaactacatttgaatttaaacagaaaaggaattttatgtttgaaagtaaattggtcccattctctgggattctgatcttcctggggccatagcaaaggaagccaaaaatggtattagggcattccctctataaaagtatcttgcccaaatgcaactactgcgtaatctctccccagccattggagtaccttgagagccttttgggctgagtgggcctagaaaaccagcagcatggaaagctaggtgagaaggtgagcataacgtgtcctgctgacaaactcctccggacccatgggggaaggtcatgcttgcatccatgggtaacatctatgatggttgctgggacccagaggaaaaaaaggaaggtcgagaagtggtatgccctttttctatttccttccaccataggccacactgaaaagagaaaggggactgaggaacgccttgtctctcctctttctctagataggtaacaaaccatgtagagtctgcattcccctctagtgcattctgaaacactggaacttcgttaaccctgaaactcgaaagaaaaaatggcttacattctattgcacaaatccatggccatcttagagacaggaggcctagctttctaagggaaacattaatttcaacactatccaacaaatagatatttctttgccctgtgagacaatccagatctttgtaagcattgtaaaattaaatctgccctcttggcagccatatcagacaaacctacaaaatataattaacaaaagtctagatacaaacccttggggaaccctcaaatgcaacttctgggtgctctactggcctcccatattttgggccaccaacacccatgtatcatcagctcctctagttttgccactcaagaaacccacaacattgctgttgccccctacagaaaatgcccagtagacatggtgttactaggattcaagttcccttctcattgcaggaccttaagaaaataaagtgagccccaggaaagttctctaatgaccctgatacatacatagaggctttccaaaatttaacccaagtgtttaatgttacatggagagatgctatgctgcttttaagccaaaccctaactgttaagaaacaagcagcctaacaggcagcaaaaaaactcaaaaacaaacagtaggtttcctatagccagtcagaaaagaaactcagtcaaaagggaaaaaaagtgacagaatccccattcgcagtaagaataacaacaatgccccttaaatatcctaattggagcccttgtgatcctacagagaagtggaaaagaagacactttccgatgtgcatattagaaagcttgcaaagaaccacaatcaatcatgttaattactctaacctgtccctgttaaatcagaaaccagataaaaatcccatggactttttgaaaaggctgagaaaaactttagtaaaacacacctccctgtgttctgattcaataaaaaaggtttattacttaggcagacactaatatcagaaagaagttgctaaaacaggccctgttcaaacatctttctaggttttgtcatccacaagttgaaactttgctgtatttaaacaacactgttttctgtgccccaactgaggaggtctcaggaggcactaaggctttcatcaattttttagctgaaagggaatataggctttcaaaatttaaagctcagctctgtcaaactgcagtaaagtagataggtctagtcagaaggtaccagaacaccaggtaaagaaataattaaactcattttctccttttcctttcccaaaactcttaaatagttggggggatcttagacattactggtttttgagaactctgggtacctgggaatggtgaaatagctaatcttttataccatcttattaaaaaaactgaagcacctaaaaacttactcgctaacttgggaagctaaaactaaaaggcctttaactaactaaaggcagccttacttaaagtgccaaacctcagtcttcccataaggaaggcatttaatctctatgtatcaaaaatgaaatgaatgaccctgggagttttaactaaggttcaaggtccagctaaacaaccagtgggttacctaagcaagaaacctgatttgatggctagaggatggccagcgtgcctctgagcagttttggtggtggcttgcttgtaccaaaggccatgaggttaacaatgggaaataacttaactgtctgcattcccacattggactgctgtcctctaaggaaaacctctggctaataatcacctcctcaaatatcaagttttgctgctaaagtgatctgcagtccagttgaaaatgtgcccttgcctgaaccctgacattttctcctaggggaaactaaagagcctaaacaggattgtaaacaggtagtggtgtaaactggtaaaggaaataataagaatcactgtttatattctctgtgaagttttaattaattaaaaaaaccttttttaaagtgcactcaccttaatgaaaagttaatatccaacctacaagtatattcaaaaagcctttctatttttatctttataaaacctgttttcttggaagaggaattttttctcactcaactaaatttattttctccacttttacttgtcactgttgatgcaagcatagaaggccctaaaataacctctggtggcctgggactcctcaagaaaacaaaaaagccatgacaaattgcattttaaaagaaatatctgctttttttttcatgaaacccctagaattaaaagtaaataagtccctctcaaaatatgtctttttcttctaggtatgcttgcttattaggccctggaaactgtattcctagccctgttctttttttttgtttttactggggacagagtctcactctgtcacctaggccagaggtgcaatggtgcaatcttggctcactgcaacctccgcctcctgggttcaagcaattctcctgcctcagtctccctagtagcttggattacaggcacctgccaccatgcccagctaatttttttgtatttttagtagagacggggtttcaccatgttggccaggctggtctcaaactcctgacctcaggtgatccacccacctcagactcccaaagtgctgggattacaggcataaccactgtgcctggcccctagccctgttcataaaggtcctcaaccggagaccaataatccaattagaaaattggcaaacaaaaaatcttatagttactgaatcttcttctgttagtctagatggttatatacatgttttgtgtgatgtctataaaaaaaaacctctaattaattggcctacaaataagcacttagataaaatattaagacaaaattaaagtctctagtgcttcttggttcacgcaactttaagaaataaaaacattcttgtagaatacaaatatcttacaaatgtaaataggtggtctaaattatgcaggccaaatagcaggtttgctaaatgttttaatgttgtaaactgcttccttggcctttaagaactgtcaaccggccagcttcacaaatagtaaggcctggtgacatataaaactaaccatgcccctaactatactggaagaagtcagactttatctgttcctagcacataattaaaacaacttaccaggttttacattaaagttaaaattacataaagttaccattataacatgtattgagactactaaaaatggatttgcaggcaatgtgtgtaaaaacggtaaaattttttaataaaaaattacaagaaggcataaaaatctacatttttcctaggaataaaagattgtcttaaattaaataaagtgaaagttttaagcaaatttttaaaataccataaaaattaattttgcaaaagaaaacctctgtgtaaacatattagctaaattcaaaggaataccatatggtttttctttcaattaagcatttaaatgaaagcacagcaaagttttctaaagatgctaatctgctctatatcaaaatttctaaaagattatataaaagatttgtaaaaaatcagagatccattccaagatggctgaataggaagagatctggtctgcagctcccagcgtgatcgaggcagaagacgggtgatttctgcatttccaactgaggtacatggctcatctcattgggacttgttggacagtgggtgcagcccacagagggcgagccaaagcagggcaaggcattgcctcacccaggaagcacaagagattggggaattttcctttcctagctaggggaagccgggacagactgtacttggaaaaatgggacactctcgcccaaatactatgcttttcccaaggtcttagcaaccagcagacaaggagattctctcccgtgcctggctcagtgggtcccacgcccaaagagccttgcccgctgctagcacagcagtctgagatcaaacaatgaggtggcagcctggttgggggaggtgtgtctgccactactgaggcttgagtagctaaacaaagtggccaggaagctcgaactgggcagagcccactacagctcagcaaggcctactgcctctgtagactccacttttgtgggcagggcatagttgaacaaaaggcagcagacagcttctgcagacttaaacatccctgtctgacagctctgaagacagcagtggttctccaagcatggcatttgagctctgagaatggacagactgcctcttcaagttgatccctgacacctgtatagcctaactgggagacacttcctagtaggggctgacagacaccacatataggtgggtgcccctctgggatgaagcttccagaggaaagatcaagcagcagtatttgctcttctgcaataattgccattctgcagcctccactggtgatacccaggaaaatagtgtctggagtggacctccagcaacttgcaacaggcctgcagctgagggacctgactgttagaaagaaaactaacaaacagaaagaaatagaagcaacatcaacaaaaaggacatccacaccaaaaccccacctgtaggtcaccaacatcaaagaccaaaggtagataaaaccacaaagatggggagaaaccagagcagaaaagctgaaaattctaaaaaccggggcatcttttctcctccaaaggatcacagctcctcaccagcaatggaacaaagttgaatggagaatgactttgatgagttgacagaagttaggcttctgaaggtcggtagtaacaaacttctctgagctaaaggagcatgttcaaacccattgcaaagaagctaaaaaccttgaaaaaaggggagatgaatggctaactagaataaacggtgaagagaagatcttaaatgacctgatggagctgaaaaccatggcacgacaacttcgtgatgcatgcacaagcttcaatagccaatttgatcaagtggaagaaagggtatcagtgattgaagatcaaattaatgacataaagtgagaagacaaagttagagaaaaaaagagtaaaaagaaatgaacaaagcctccaagaaatatgggactatgtgaaaagaccaaatctacatttgatagatgtacctaaaagtgatggggagaatggaaccaagttggaaagcactcttcaggatattatccaggagaacttccccaacctaccaaggcaggccaacattcaaattcaggaaatatagagaacaccacaaagatactccttgagaagagcaaccccaagacacataatagtcagattcaccaaggttgaaatgaggaaaaaatgtaaagggtagccaaagagaaaggtcaggttacctacaaagggaagcacatcagactaacagtggatttctcggcagaaatcctacaagccagaagagagtgggggccaatattcaacaatcttaaaggaaagatttttcaacccagaatttcatatccagccaaactaagcttcataagtgaaggagaaataaaatcctttacagacaagcaaatgctgagagattttgtcaccaccaggcctgccctaaaagagctcctgaaggaagcactaaaaatggaaagaaacaactggtatcagccactgcaaaaacatgtcaaattgtaaagaccaccaatgctatgaagaaaccctcaattaacaggcaaaataaccagctaacatcataatgacaggatcaaattcacacataataatattaaccttaaatgtaaatgggctaaatgctccaattaaaagacacagactggcaaactggatacagagtcaagacccatctgtgtgctgtattcaggagacccatcttacatgcaaagacacagacaggctcagaataaagggatggaggaagatctaccaagcaaatggaaaggaaaaaaagcaggggttgcaatcctagtctctgataaaacagactttaaaccaacaaagatcaaaagagacaaagaaagccattacataatggtaaagggatcaatgcaacaagaagagctaactatcctaaatatatatgcacccaatacaggagcacccagattcataaagcaagtcaccagagacctacaaagagacttagactcccacacaataataatgggagactttaacaccgtactgtcaatatcagacagatcaacgagacagaaagctaacaagtatatccaggacttgaacttagctctgcagcaagcagacctaatagacatctacagaactatccaccccaaatcaacagaatatacattcttctcagcaccaccttgcacttattctaaaattgaccacataattggaaataaagcactcctcagcaaatgtaaaagaacagaaatcacaacaaactatctctcagaccacagtgcaatcaaattagacctcaggattaagaaactcactcaaaaccacacaacatggaaactgaacaacctgctcctgaatgactactaggtaaataacaaaacaaagccagaaataaagattttctttgaaaccaatgagaacaaagacacaacataccagaatctctgggacatatttaaagcagtgtgtagagggaaatttatagcactatatgcccacagagaaagcaggaaagatctaaaattgacatcctacaatcaaaattaaaagaactagagaagcaagagcaagcaaattcaaaaactagcagaaggcaagaaataactaagatcagagcagaacagaaagagatagagacacaaaaaacccttcaaaaaatcagtgaatccaggagctgtgttttgaagacatcaataaaattgataaaccactagcaagactaataaagaaaaaaagagagaagaatcaaatagacgcaataaaaaatgattaaggggatatcaccacctatcccacagaaatataaactaccatcagagaatattataaatgcctctaagcaaataaactagaaatatagaagaaatggatgaattcctggacacatacaccctcccaagactaaaccaggaagaagttgaatctctgaatagaccaataacaggatctgaaattgaggcaataattaacagcctatcaaccaaaaaaagtccaggaccagatggattcacagcagaattctaccagaggtacaaagaggagatgataccattccttctgaaactattccaatcaatagaaaaagagggaagcctccctaactcattgtatgaggccagcatcatcctgataccaaagcttggcagagacacaacaaaaaaagagaattttagaacaatatctgtgataaacattgatgtgaaaatcctcaataaaatactggcaaacccaatccagcagcacattgaaaagcttatccaccataatcaagtcagcttcatccctgggatgcaaggctggttcaatatacacaaatcaataaatgtaatccatcacataaacagaaacaatgacaaaaaccacatgattatgtcaacagatgcagcaaaggcctccaacaaaattcaacagcccctcatgctaaaaactctcaataaagtaggtattgatggaatgtttctcaaaataataagagctatttatgacaaacccacagccagtatcatactgaatgggcaaaaactggaagcattccctttgaaaactggcacaaggcaggaatgccctctctcaccactcctattcaataaagtgttgaacgttctggccaggtcaatcaggcaagagaaagaaataaagtgtattcaattaggaaaagaggaagtcaaattgcccctgtttgcagatgacatgattgtatatttagaaaaccccattgtctcagcccaaaatctccttaagctgataagcaacttcagcaaattctcaggatacaaaatcaatgtgcaaaaatcacaagcattcctatacaccaccaacaaacaaacagaaagccaaatcatcagtgaactcccattcacaattgctacaaacagaataaaatattgaggaatacaactgcgagggaatgtgaaggacctcttcaaggagaactacaaaccactgctcaatgaaataaaagaagacacaaacaaatggaataacattccatgctcatggataggaagaatcaatatcgtgaaaatggccatactgcccaaggtaatttatagattcaatgccatcccaatcaagctaccattgactttcttcacagaattgaaaaaaactacttcaaagttcacatggaaccaaaaaagagcccatattgccaagacaatcctaaccaaaaagaacaaagctggaggcatcacactacctgacttcaaactatacttcaaggctacaataaccaaaacagcatggtactggtatcagacagatatattgaccaatggaccagaacagaggcctcagaaataacgccacacatctacaatcatctgatctttgacaaacctgacaaaaacaagaaatggggaaaggattccttatttaataaatggtgctgggaaaactggctagccatatgtagacagctgaaactggatcccttccttatactttatacaaaaattaattcaagatggattaaagacttaaatgttagaaataaaaccataaaaaccctagaggaaaaccaaggcaataccattcaggacataggcatggccaaggacttcacgactaaaacaccaaaagcaatggcagcaaaagccaaaatagacaaatgggatctaataaactaaagagcttctgcacagcaaaagaaactgtcatcagagtgaaaaggcaacctacagaatgggagaaaattttcgcaatctacccatctgacaaagggctaacatctagaatctacaaagaactcaaacaaatttacaagaaaaaagcaaacaaccccatctgaaagtgggcaaaggatatgaacagacacctctcaaaagaagacatttatgcagccaacagacacatgaaaaaatgctcatcatcacttgtcatcagagaaatgcaaatcgaaaccacaatgagataccatctcatgccaattagaatggtgatcattaaaaagtcaggaaacaacaggtgctggagaggatgtggagaaataggaacacttttacattgttggggggactgtaaactagttcaaccattgtggaagtcagtgtggcgattcctcagggatctagaactagaaataccttttgacccagccatcccattactgggtatacacccaaaggattataaatcatgctactataaagacacgtgcatacatatgtttattgcagcactattcacaatagcaaagacttggaagcaacctaaatgtccatcaatgatagactggattaagaaaatgtggcacataacacaccatggaacactatgcagccgtaaaaaaggatgagtccatgtcctttgcagggacatggatgaagctggaaaccataattctcagcaaactatcacaaagacagaaaaccaaacacagcatgttctcactcataggtgggaatttaacaatgagaacacttggacacagggtggggaacatcacacactggggcctgttggggggtagggccctgggggagagagagcattaggagaaatagctaatgtaaatgattagttgataggtgcagcaaaccaacatggcacatgtacatctatgtatcaaacctgcatgttgtgtacatgtaccctaaagtataataataataattaaaaagatttgtaaaaatctcatttcatggtcaaactggttaagattaaatagaattgtctataatttcattaaaattgcagttaacattaatagtcaactaatgcaagggtaaaatttggctttctctttttaacaggatttttatgtaatagtaagggctaataaaaggtttttgctttttcaaatttttaattcttcatgttggttaaacaaataacttatgataatctaaaattctattctgtaagattaactgttttatacctgtaacatatttaacgagctccccaaaatcaaacttctgtttcaaggttgtcttttctgagtcctggctttttggtgctacaaagagtccctaaagcattcaaaagaatggcaaacagaattatttaatatgtttaggaacatgggattgtcaaaatgatgtctaatttttttcagtttatatttgagtatataatattaacatatgttccaaaaccagctacgcatggtggctcacgcctgtaatcccagcactttgggaggctgaggcgggcagatcacctgaggtcaggagttcgagaccagcctgaccaacatggagaaaccctgtctctactaaaaataaagaattagctgggtgtggtgacacatgcctgtaatcccagctactcgggaagctgaggcaggagaatcgcttgaacccaggaggcggagattgcggtgagccaagatcacgccattgcactccagcctgggcaacaagagtgaaactccctctaaaaaaaaaaaaaaaaaaatgttccaaaaccatatggggtgtctaaggttctaatgtctaaatatgtgctatcaatcaaaattaagtttgttatgttgggttattgtaaactacaaagataaccaaatttttttgtccatcatgtttctaactgtaaccctggacattttgtcattggcagacaattttcttgttttaatcctcttaaaaaatgatttataatcagctgtggaactttaacaggtgctctcaaacacagatttctgataacataaaagtacagaactcataaaaagctaaaatgtttatggatatcaagcagaaccaagttaatagaatggatttagctaatagaaaactaaagcaatgtttttaactttcacttaaaacattgctaatttttattttgtttttcagagtcagaaaaactttcttaaaagttttaaaaaccgagcaaggtgtactgctgtaaacataatttggaccatgtctgtttctctttgccttgttctcctaaaaatcaaaaactagttataagtattcttaacttaaaacaatatagttgtttgcatcagtgaaacaaaaattcattttctttttttctgagacatagtctcattctgtctgtggctgatgtgcagtgccacaatctcagctcactgcaaccttgcctcccgggttcaagtgagtctcctgcctcagcctcctgagtagctgggactacaggcatgcaacaccacagccagctaatttttgtatttttagtagagatgggatttcaccatggtggccaggatggtctcaatctcttgacctcgtgatcttcccacctcagcacagccagctaatttttgtatttttagtagagatggggtttcaccatgttggccaggatggtctcaatctcttgacctcgtgatcttcccacctcaacctcccagagtgctgggattacaggcatgagccaccgtgcccagctgaaaaatccactttcttatgcaatgaaacacaatagaaaaatgctagttgttttaccaaggctttaatggaagggtatgttttttttgtttttttgtttttttaagaaatcaagtttaagttgcaaagccaaacctcttgggaaagctggtctcatacctgtagtctacacagtcttcatacagaattcctggcctgtggtgagtaaaaaatgtcactttctaacaggctcagaaacactatgatcttggaacctcaaaaatacaggagtttactcaactcacaggtatttaagggtacaaatccatggcttggcccagctttaaaaagtcttatctaagatttcttttggaacagagtttcatcaaagcctatcaaaaaggcctatgtagaggtagttattcttgctgcactgtgatcagtcaggccaagtataatactaaagtttattttgcaaacaattcagtctattttgagttgtttttaacaaaataaaatctaaaaaaaaaaattatctttcaaaacttaccatacatttctcatgaacttctagtctcattgattgttttagagtttttgatgacgttttaaactaacactgcttattcctgtaaaccaaccagcaatctctgcctgcagctcagaaaacagaaagggatgggtcatgtaaaaatctaaatcaatattctagttctaagcaattattctgcaaatcctgctgggtgatgaaaataaataaggtgccaataacccagatgcttcttttatcagaaagtaagatcaagggagctaaccaaagccaaacctcatgcacccaaatcttagcaaacataactatagctaccaggtatcagggtgtgtcagcagcctcaacatttttaggcttttcctactccccttgtttcatttcaatgcatgttctctactaaaccagattgtttcttttttcctaaaaactgtcgagctccaagtggtaatgcaaatggaatgatgcatatacacacgtttcttccaaggacccttaaaccaaccctggaagaaatcctagctgctgttttctacacagcacccctctccagtgaggaatagccaaaaatatcaatgcctattttccctaacagcagttagggtctccactcctgaggggggactgagagggattagctagctagcctaaggtagatagcaagggaagggtctccagagagtccccaacccatgagtcagtaaccacatacccaccaagccgggcattatggcacactcctgtaatcccagtgactcaggaggctgaggcatgagaattgcttgaacctgggaggtggaggttgcagtgaactgagatcataccatttcattccagcctgggcaacagagggagactcagtctcaagaaaaaaaaaaaaaacctcatcttttatcaatattttaatagttttatgtctgagcacttaagcttcaaggacaggacactgaatgatgataagtgcatatttaaatttataaagtaaaagatgaccatcagagtctaataagtgatgaatacagcaacatcatacttcacaaaatcattccgggtatgtttgacaaacaagaaggttgcataggaccttcttgtgctattcatgtgaagtgctcttctctctcactttagtctcaattcccaaccttacagctaccacatactcacatacacagaataagaaaaattaacttattttcttagaaagctgtgattcacattttattctattacatcttttccacattgctgttacaatactgttgaagtgcaccttctttcaccagaagaatacttttgtgaacgtgaatagactgacactggagaagaccagctcagcaaactcacttgaacgatccctttgcttttcaggcagtaaaaatgccttcgaggagtgaaaataaagtgactgcggattaagcagacagttatacatggaaaaacatttgtcaattgtttgaagattacattgcatggtctacaacttttaaaatataaaatgcataacataaatactgcaaaagaaaatagaataaaaatgatgtagttgaccacaaaggacagcaaagctgtattatagcaatatagaaaaatatatatctggccgggcgcagtggctcacgcctgtaatcccagcactttgggaggccgaggcgggcggatcacaaggtcaggagattgagaccatcctggctaacacagtgaaaccccatctctactaaaaatacaaaaaattagccggcgaggtggcgggcgcctgtagtcccagctactcaggagggtgaggcaggagaatggcgtgaaccccgggggcggagcctgcagtgagccgagatcgcggcactgcactccagcctgggcgacagcgagactccgtctcaaagaaaaaaaaaaaaaagaaaagaaaaatatatatctactgccagaaggtaacttgaagtatttgagagatgttctctaagaatctaacaatatttttagttttagattctgtaaaaaatttaagcatttttaattttcaaaaaaatttgagtgcattttttgtcagcttagttttcctgaagaatttaaatataatagagtaaaataatacatattaaaaatgatttttctggtaatagagcagtttaatttttagattaaaaaagtaaaattttacaaaattatatgctgaccagtttaatcagaagcttctttcttacaactgggagaaatgacacaaagactcaacttttatgtcaggtgggagagaaaatgattactaggggctagaaaattgttgtttcactaatcaatgttgatttttattgctattttgtctcaaattatgttaataataaagtaatggccttgatccaaaaaaattttttaaaacttattttttcaatcagccaaaatattaaccaaaaggataaaggtatttaagtcataatttatagtataaaattaaaatgtttctagaaatataaaaggaaaaaagatatataaaaaataagaaaaggaaaaaagtggattactcacaatagctaaggtatgaaatcaacctaagtgtccatcaacaggtgaataatttttaaaaagtggtatatttacacaatggaatgctctttattccttaaaaagaaagaagtcttggaggtgggctcagcagtctgtgtcttagcaagccttgcagaaattctgatgcacactgaagtttgagcgtcactggaatggatagtgtccaaatgattgctgggtcaccccacctatcctgaatgtcaggaacatcctgagtgagaccagtcagtacattgtagctctttctccagccacaaccagaaagtctttgcttcccctttgccttccatgattgttagtttcctgaagcctctgcagctgtgcgaaactagaaaaagatgcacacccaaaagccccatttgaaacttctagacagaaagccaagcatttggagagtctctttgaacagttttaaacacaattgcggaaaagaaagcaactctactcagtgtgaagatgatgagaatgaagacctttatgatgatctacttccacttaataaatagtgactttagaatccttaacacagcactcagctaccaagccaatgaataagattttgcatcacagttgaaatctgttctccactccttttgtagatgttctgaattggttaccagaagccaattgtctcattattaagatggcttctaaactgattcatttttgtgatacataatgactgttagttgaggtctagttgtatggtaaaaaatgctgatgaagaatgttgtctacagagaggatagtcaactaaaattaactgtgagctatgctaaggagctatacttaattcgttcagactttatttggccaggtttttttttatatttcaaagaagaaaatttttttaaaaaagtctttatttgcaacaacattgatgaacctggaaaataagccagcaataagccagcacacacacaaaacaatagcaaattatctcacttctatgtagagtattaaaaaattcaaactcactccaggtgtgaagtggcggccttgtgtgtgatctttctgccctccccaagtttgcattttcgacattaaagtctactttttaattaaaagttttaaattggagaataaaaaaaattgatactcataaaagcaaagagtagaatgatgattgcctgaagctggaggtggaggagatgttggtcaaaagtaatgagtctttcctacatctcttaccttaacaaataagttattcttctctttttttaaatcaccagggaattgaatatttcctgaagaattaaaactgaaagaataatatatatttattaaagcaatgcaggttgtatactgaaatttcagaggcttagtaaaataatatatattctgctaaaatcaccatttcctttttttctgattaagaggacttttttatgacctttcagggattatgttttctttcactttctatctgcattctctttcttcagccaactgattaaaaaaagatgcagagaagatacattttcttctcatccacacatcacttccactttctattagtcaatgtgagtagagctgagaatagctgttttctagcatgacagcaatttctcagaaataaaaacactctgaaacaaaactataaatctttcatcaaaagttaatgtattttaagcaaaataagcatatgcatcaataataaaatgcttgtggtagaatcgatttattttgttgatttctattgagttcagataagatttgaccaaaagctagcaaatatagagcagaaaaaagaatattatctgaaatcagaatatggtaaatgaagttaatttgtcaatagaaataagaatattatgacctcatgctaatagtctcatctaaagttgtacaacaccaaatgctacgttttattatagactgtattttacataagtattcaatttatatcatcctctttcactatttcaatgccttctccactttgtatcagtggaaaacaggccagctacttccaagaaagcaggcaatgctcttcttactttaacaatgatgatgaagagcacttgtttcagtgatgctcccatgccaaaaactgttattttggcggaagtactagttttctatttttctctatatttattaataataaaattcttaaccaagaggaatttatctcattcaagttttaaggaattttgtttacatttaagtgtctctgactttcctggaatattgaaatttttatgaatctaagttgagtactataaataaacaatcttttactaaaatactttttgaagtggggtgatatttataaaaacttttcataacattgaagatatgttttaaccatgttcccagtaatcactctgaacatagaattttcaattttcactgagtcactcaggggaaattgatatctttacaaatgggcaaaaaaaaaaggtgctgagtggaggtgcaacacattgcacatcaatgcttttcacatgcaactattagggtcttaatttaattgaactgtcatttgcatagctagacacttactgaatctagtcatactattttttggcaactagtgccatgtttgtcacctattagttttatacacttatttgcttgactgaaaaaaataaatcttcttttaacttactctaaattgagagactagatttacattctggagctataatagaagttgaatgtttttaatactatttttggcaaattctcatatattcacatataaattttatgaaaagatagggagttgacaaaaagtaaaaaaattcaaatacgttaagcaattttgagatctattgcacagcagggtaactatagtaaactataaaatattgtatatttcaaaatagtaaattttaaatgtactaccacaaaaatgataggtaagcaagttcacagatatgttattaaactaattattccatattttataaatatactaaaacatcacatcgtagcccataaatttatgcatctgtgatttgtcaatcaaaaatactactactttttttatgagagtgaaataagctttaagatattgcaccagagaaaaatgtgtttgttcatcttaaaattttagaaagcgtatacatacatattttttatttcaaatggcttgctcatttactgatgtacgtaaacttttaatatcatgaacagtcagaacccagcactcagaaatagactgttgatttttagtgttcaaaataatataatactttaaaagacagactctaaagcaactgtttagagtaaaattctctttaaatttttaaataaaagatttccttcacttgttagaaaaaaattttaatgtttttaaactacattgaaatttatcaaattaacataaatttattagacaataaaaaacaatatgccttcttctaattataaaactgacagacactctgcatttaaccaaatactttggtacatggattttaacgatatctctaatgacttaaaagagccactagttttaatttagaagtatattaaatttttatattaaaatctaggattagcctattattacatagaaaatttgtggtctgcatgtacatcatcagttgagtggtctacagttttggagtttcagaaacactaatataagaatacttcttccgattgagtaatttaagttttctcagtgactaaaaaagattagaattactgatcactcacttacgatgtggttttaaatgttatttaatgaagatatataaagtttcttttaaaatcattttaacaacttatttcttttgctttttcacttttattagaaaataagtatgaaaatttatgttactacaaacccataaattttatttaaatctagacatagtgttaatcttcaaagatctgatatttaaaattttggataacctatttatacttagaagataaataactgctttccagtaaatctaatggggcaattttgactctcaattataagctattaaaatattaatactatcatctaggtggaaattttaggtatctgcatgctcaggttgtttagcatataaatcagaaactataaatgtttataaactataaataataaactaaaaatataaagtatcattttttctcagttttgaaatactgtcattatttctaggtgacattaacactcaattacagaggctgtgactgttgaaattagaaatgtcatggttgattcttctttacttgctgcctttttatttcacacaaacacagcagcacaagtaaggcaagaaaggccacgctttgactgcaaacacatcagtgcccttctagggagaataaatgtgtgagcatattcacttgaaattcatggcatcttttgttcaagtacagactttcatatggaaagtaaaaaagacaataatttcacagcaatagcataagaaaagtactctaaaaataccttctgacccattatttctatttttcacaagaatgattgtgatggaatgagcatttgcagcactgtggtcttaacctccactttctgtttaattatttttggaatacgaccataagacttttgtgcttttttttttttttagaaaaaatgttttatatttctaattcagtaatttagcataattttttgtctcacactttcaaaaatagttcattctgaaaaaaatgattaaaccactacttaccactttttccccaaaaagagtagagtaacaaatgaagtctataagtctagagtacatttaattcataaataataaaggtgtaatgtgttttagctgcacacttgaaaatgaaacactttttggactatagcccaagagttttcagagaggttagcttataacatgtgaggagacctggtatagaaacattcaccccacgccttaagaggtgaaaatttgtctttcactcttaatttcaactattaacccagagctggaaaaatagaacatttcattataccaaaaacattttgtttttattttatatctaaggggtacatgtgcagatttgtaaaacatgtatactatatgatgttgaggtttggacacttaattattccattgcccaagtagtatacatcatacctaaccagattttcaatgcttgtctcccttccttcctccttctctttagaattcccagtgtttcttgttttcatctttgtttccatgtgcacccaatttttagcgtccatgtatgagtgagaacatgtggcatttgtttttctgatgcattaatttgcttagaatggccttctgctgcattcatgttgctgcaaaagatgttacttcatgctcttctgttgctgcatagtattggaggttgtataagtacatcattttttcttaaccaataaaagattcatgggtaactggtttaattctgtttttactattgtgaatagtgttgcaattaacatgtgagtgctggtgtctctttgggaaaattattttttcggggcagatccccagtaatggggttaattggtcaaatggcaattgtatttttagttctttgagaagtttccaaactgctttgcacagggctgaatcaatttgcattcccatcaacagtgtagaaagatttccttttctccacaacttcaaatcttatcttgcttttaataacagtcattcttactggtgtgaaatggtattgcactgtcaccctgatttacatctttctgataattaggaatgttgagcaatttttatgtttattggtagctctgtcttcctttgagaagctagctatttatatcatttgcttttttattaaatgttttatagattcatatattaatcctttattttctgcagtttgcaaatattttatttcatactgtaggtcatctgtttactttgttggtagtttcttttactgtgcagaagctctttggctgaattagatgccattttcaatttttatttttgttgcactcatgttagatgttagtcataaattctttccagaggccaatattttctaagtgttctcccaagatttttgtagcttgaagacccacagataaagtctttaatctgttatttttttatatagaaaaaggtagttcagttttcttccacatacaactaaccagttttcccagtattatttactgaatagggagttaattccccttttatttctgttggctttgtaaaaataacctggttgtaaagtgtagcttagctcaggactctctcctatttcattggtctatatgtatatttttgtaccagaaccatgttatactggctactctgctgcaatcttggctcactgcaacctccacctcccaggttcaagtagttctcttgcctcagcctcccaagcagctgagattacaggcacgcaccaccacacctggctaattttttgtatttagtagacactggtttcaccgtgttggccaggctggtgtcaaacttctgacctcaggtgatccatccaccttagcctcccaaagatgacaggtgtgagccatcacgctcgacacagatttattcttttagtctgaagcagtcttggctatttgagctctttaattctcttgtatatattttggaatattttctttttctaattctataaaaaagcatcatagatagtctgataaaaatagcacttaatccgtaggttgctttaggcagaatgaccattttaactatattatttgaatccatgagcatccagtatttttccatttatttgcattctctctcatttctttcagcaatgttttgtagttctctgtagagatattttacccccttgatttaatgtatttctaggtatttttttttgtggctattgtaaatagagctgttttttattttgttctcagtttattggtgtacagaaattctatgcatttgggttgattttgtattctgagatttttttgaagtctttaggcttaggagtctttcggtgaaatctttaaagtattcttggtagagaattatatcatcagtaaagataatttgacttcgttttctattcagattccttttatttctctggctacgactccataactatgttcagtaggactgtttagaatggatattcttatttttattcttatggagaatgcatccagtttttgttttagtatcatgttggctaaggatttgtcacagatgacattattttgaggtatgtttcatcagtgtctagtgtattgataatatttttgtcaatattgcattttcttggatgctttttctgcacctattgtgttaaatatttttttcttttaattatctttacatggtgaatcacactaattgacttgcctatgatgaaacacctttgtttttatggaataaagctcacgtgattgtagcaaaataacttggatttgcttttgaattcagtttgctagaatttcatggattattgttccaatgttcacccagaatattgacctgtagtttcctttttttgttatgtcttcactagattttagtttcatatatttcactgatttcatataattagttagattgaaatgccaccttgattttttggaatacattcagtaggattaggaccagcttatctttgtatatgtagtaaaacttggctgtgatttcatatgatccagggctttttatggttagtagttttattattacttgttcaaggtcactatacattttacatttttgctctgttaaagacttctgttattttctgtcaatattgggaagttttgtgtatctgggagtttgttttctctaaattttctactttgcatgcatgttcatagaagtctctgaggatatttttaaatctatgtagaattagatgtgatttctcatctctaacatttaaataaatgcagaataagagtttaacaaaattcaacatttcttcataaatttctgaaaaaagtaggtataggacaaataaacctcaagccaataaatgtcacatataacacacatataaaaagcacagctaataacatactaaacagggaaatcttgtaagcttttactctaagagcaagaagacaaaaatgcccacttttttcagtcttattagacatagtatgaactatccaagacagaaaaattagtaagtaaaatcaaagcactgagattagaaaaaatgttaaattattcctgtgtaatttttcatttctatacacaattttaagtaaacaaaagcctattactaaaaattagtaggactaataaacaaatttattaaacttgcagaatacaaaagcaacatccaagtgtccatagaatttctatacattgacaactatctttaaatgaaattaaagaaatacacaattggaaaaatattactttcataagttggcattaatattgttaaacatctgtattatacaaaattatgtacagctataatgcaacctctaccaaaataccagagacataactgacaaatttttaaaaatatatctaaaatttacaggataccagaaaaggccctgaatagccaaagcaaccaagcaatagaaaaagtgaaggtatcactctaccggactgaactgaaatatactaaaaagctatagtaaacaaacaaacaaacaaaaaagtatggtacttgaataaaaacagacacacaggcaagtagagaagaaaaaggagaccagaaatatcttgatgtttatattgatgtatttacagccatctgatttttaaataaaggtggcaatttcttagggaaaaggcagtatcttcaataaatggtgttgagaaaactttatatccacatgtagaggaatataataagaccctcaactcacaccatatataaacaaattagatacttaaaataaaaacacaaaataaattagatacttaaatgtaaggtctaaaactctgaaactactataaaaaacatagactgaaagccctgtaacattggttgggcagtcacttttagaatttgacctcaaatcccaaggagcaaattgaaaaaatagatgaatcagattattttaaatttaaaaactgctgcacggaatataatacaatcaacaggatgaggcaactaaaaaatggaagaaaatatttgcaaatcataaatgtgacaagggattaatatcaaaaccatataacaaactcaaatgactatacaataaaaaacaaatattaaaaatgagaaaaaggcttaaatatttttcagaaaaacacatacatatgaccaacagatatattttaaaaatgctcaatgtaaattattatcaggaaaggcaagcaaaaaaagaactatgagatatcaactcacttctgttagaatgactctaattaagaagaaaaagtgttggtagaattctgaagaaaagaaaatgcttgcacactatttgtttgaatgtaagtgaggacagccattatgaaaaatagagttttcttaaaaaacttaaaaatagaactaccatatgacaattgcaccactgtatatccaaaacaaaggaaattagaatgaagaaacatttgcacttctaggttgttcgcagcactcttcacacgtaaaatacataaaatcaacagttcaacatctaatgagtaaataaagacaatgtggtagatatacacaatggaataatattcatctttaaacaacaaaaattctattattttcaatcacatggattaccctagaggacattttattagttgaaataagcaaggcacagaaagattaaatgtctcatgagttcacttacacatggattctgaaaaagttaatctcatcgatgtagagagtaaaatggtgaccaccaaatgccaaggtatttagaagaaatgggggcattgaaagatgtctgtcaaggaatacataattatacttggataaaagaaataatttcaagagatttattgtacagcatggtgactatagttcataatgtatttgtatttttgaaaaatgcttacaatttcatgtggtctaaccacaaaaatgttaacaagataaagcattaattacctagaactaagcatttgataatgtatatatacttcaaaatgttaacaaaagaaatacacattttatttgtcaagttaaaaatatatttttaagacactatagaaggataacaatgtttcaaatactgtctgtctctttgctgttttctcatttgtcagtcataaccataggaactttgatgtttaacagcatgttctgaacccagcacagtgcatgggagaagccaataactttagggcttttattttaagcttggggcacttggagttactggtgcttatggtgatagtatgaaagacacgaaaacggaaggcttgcttatgctcccatgactggccactgtgtgatcacagtaaactggtttgcatgcaaactaacaggaaatgttttaatccaaaagctgccattatctccaaaagttttcagagaaaacctaggagatcgctagttaggtgactaagaatataaactgtagactaaacttcaaccactaaaacattaaaaaaagagtgataaatgtctccaaatcgtaatatcaatatggaaaataaatattattccaaatgtacagaggtcattttattgctttgcaacctttaacattcacactttaaaacagaggattttgcatggaaatgtaagttgtgctgtaagtacatcctaaataaattttaaattgctcacttactattctcttaaaaatttaatttttatgtttgttctagcaaattacatatttgccacactttgtataaaaacctaacatttttcttttacaaagaaacaccatgctgatttaatcctctcttcggtaggcagtgtatgtcttttatgttaattagccaatcttaaagttgtattcgtatgcaaaccttccagttaaaaccaatgtttcagtacatgaaaaaataccaatgctctccttaaaacctacaacataccttgtgaatcacatggcatgaaaacaacagtgagaaaactgtagccataccacagaaaaagaaggactgtgatgcatatatggtttgaatgcacataaaaagacaaaacttagataattaggacatgaatgaagcatttctctttaaattcagcaagattcagctttgcagcctggaaaaaatgttctcttcacatgaagaatcaatgttatgtctttgcaattgatattttccatctctgacttgaagttataaactaactttagcaggaatgtttatgacaaaatatggagcatctgttacacactgagcactgtcatgtttgtttgctatatttatatataaaagcatccacatgacttatgaagcttccctagtacttactgaaacaaattgactcaataaataaaatttacttatgtcacttataaaaagggaacaataacttaagaaaagtaagcttatatagggttctcccatagaagctaatggaatgttttaactaaataaaatgtaacaatacacaaattgtggaattatatctaaaaataattttgtgtgcatgatgaaattttataaaaaatattcttataactcaaatcagctcagataaatatttcataaactataaaacaaaaaaataagaaacaaaaagattgtgggtctaggccgggtgtggtggctcacgcctgtaatcccagcactttgggaggctgagatgggtggatcacctgaggtcaggagtttgagaccaacctggccaacatagtgaaaccccatctctactaaaaatgcaaaaattagctgggtgtggtggcacatgcctgtaatcccagttactcaggaggctgaggcaggagaattgcttgagcccaggaggcggaggttgcagtgagccgagaccacgctattgcacttgagcctgggcaacaagaacgaaacttggtctaaaaaaaaaaaaagattatgggtctagcatgagtatcatgcaagtaaaaaaagaaaattttcatggaaagattctaaatgataagctgttagatagtgtaataaactgaatacaaagcagagtatatacatttgcttttagcatttttgaggatttttgttttctagtaaattagacatcttattaaaatgctttgttttgtttcaatattgctcttttcttctgaaaacagttacaaacttatattcaaacacccttactccttaaacctgttatatctttagactaatagatgtgtatatttaactctatgtaagtcaaaactaaaactctattgtgtgctctcaggcagaggccacgtgttcaaaaaatacataaaaaatttttgaaaattattcaggactcagaaatatatgattttatttacgcttgtatataatttttatgatgaccataaaaataaccatgtagccaataataatttaactgtacaacttagaataactaagactgtagaattgaattgtttgtaatacaaaacataaaagccagaggttatagctaccttatttatcacaatgtgatcattatataatgtatgactgtattaaaatacgccatatatgacataaatatatacacatattatgtaaacacaaaaactaagaaaaataaatttaaatgtaaaaaaatttaacctacaggaaccatattctttaacttatttgtagtttaaagccactaaaaaagaagaatactagagatgttagtctattatgttaccaaatagtgtattgtaaccatcttttaaatatacccttgagtaaggtggaataggttaaaactagtggcataataacactttattgaatgtataacagtatttaacattataaatgttgaattgaaaaattaacacaatccaaaactttaaaaaaaagtggttttatcacataaaagtacaattagtaaaatgacatactaattattttgatttaattttaactataagaatgattttctctcataataacgcattagaatattacttagggctgggcacagtagctcacacctataatcacagcactttgagaagccaaggcaggcagatcacttgaggtcaagagttcaagaacagcctggccaacatggtgaaaccttgttttactaaaatagaaatattagctggatgtggtcaggggcaactgtaatctcagctacttgggaggtggagacaggagcatagcttgaacctgggaggaggagcttatagtgagccgagattatgccactgcactccagcctgggcaacagagtgagattccctctcaaaaaaaaaaaaaaaaaaaaaaaaaaaagaatattactcggaatgccctacatcactcaattctgtaagttaaccacaaacagcctttccacttaaattttcatcatgcatcttacatttcaatgtccttagtcatccataaggtaataaataacgaccgcctaataaagtctcccaaatctttgatgcagaattgatcacattttttttacatgtgaatacaacagaaatgaaaaaaaggcgtgaagtaatttaagagttgaattccatcattattcagtttccaaataagctgttttttttttcttttgagacagagtcttgctctgtcacccaggctgcaatgcagtagcagcatctcagcttactgcaacctctggctcccaggttcaagtgattctcatgcctcagcctcccaagtagccgggactacagatgtacaccaccatgcttcgctaattttttttatttccttttagtagacatggggtttcaccaagttggccaggctggtcttgaactcaggtgatctacccacctcggcatcccaaagtgttggccttacagatgtaagccactgtgtctgacaaaaaaaaatctgtattttcaagacaaaagtgtactttaaatgaaattataactcttcaaagatctacttcttttaaagttacatacaaataatttttctttttaccaactttagttttggattttttcctatactcagcaatctgattaagtgtaatgtctgaagtttgagacagatatttctactgtgaattctctgatatttacttaattttggattaaaattttttaatatttacttcatctgcaaacatatattttagtataaactttcgtgttttataatctgtagtttttgaaaaaatgtttttccaaattcattaaatttgcagggttattcttcaatataaattccctgatgttgagcaaagttggaacaactacctcagggttttcctgtagtacaaaatgtgtacaataaaacctgtgatacacgtaaaggtactacaactctctttatatttataatgtgtttcctcaaaataaatattcttctgtactttaagggcttatattttctgaaagatctattgacagcaactgcacttttaatgcttttatttagtatgaactctctgatgctgaataagatgtgagaagatattaatgacattcacattttttcccctagacagtctccctctgttgcccaggctagtgtaaatgctttcctttgcaattaggcatgagcattggttaaatgttttgccacattgtttattctagtagttttctccagtatgagatatcttacctacaatcaagtgtgacagccatttaaaggctttgtcacattcttcacatttctaggatttctcaccagtatgatttcttttatattcagaaaagtttcaggtgttgccaaaagccttgtcacatctttcaggtttgcagtttctctctagtatgaattagcttatgtctgttaagaattgaggatctgttagaggctttcccacattcttcacacgtgtatggtttctctccagtatgagttgtcttgtacgtagtaagccttaaggactgattaaaggctttgccacattccacacaattgtaggaattccctccagtatgaattaccttatgtttagtaaggattgaggaacagttaaaaaatttgccacattcttcacatttgtagggtttccctcctgtataaatacccttatgttcagtaagggttaagaactaattgaaagctttgccacatttttcacatttgtagggtttttcctccagtatgaattctcttatgagtagtaaggtgtgaggattggttgaagtctttaccacattcttcacatttgtagaatttctttccagcatgaattttcttatgtttgttaaggactgagacccagctaaaggctttgccacattcttcacatttgtagggtttctctccagtatgaattctcttatgttcactaagtcttgaggaccagatgaaggctttgccacattcttcacatttgtattgtttctctccagtatgaattaccttatgtttagtaaggtttgcaaccttactgaaggctttgccacattcttcacatttgtagggtttctctccagtatgaattctcttatgttccataaggtttgaggaccacttaaaggctttgccacattcttcacatttgtagagtttctctccagcatgaattgccttatgtgtagtaaggcttgaggaccagctgaagactttgccacattcttcacatttgtagtgtttctctccagtatgaattactttatgtttagtaaggctcgaaaatgtagtaaaggctttgccacattcttcacatttgtagggtttctctccagtatgaattatcttatgtttagtaagtgttgaggaccacttaaaggttttgccacattcttcacatttgtaaggtttgtctccagcatgaattctcttgtgttcagtaaggcttgagggccagctgaaggctttgccacattcttcacatttgtagggtttctctccagtatgaattaccttatgtttagtaagggttgagaagttaccaaaggctttgccacattcttcacatttgcagggcttctctccagtatgaattctcttatgttccataaggtttgaggaccggttgaaagctttgccacattcttcacatttgtagggtttctctccagcatgaattgtcttatgtgcagtaagggttgaggccttactaaaggctttgccacattcttcacatttgtagggtttctctccagcatgacttctcttatgttcaataaggcttgaggaccgggtgaaggctttgccacattcttcacatttgtaatgtttctctccagtatgaattaccttatgcttagtaaggattgagaacttactaaaggctttgccacattcttcacatttgcagggtttctctccagtatgaattctcttataagtaagggctgaggaccagttaaaggctttgccatgttcttcacttttgtaggaattctctctagtataaattcttttatgttgagataggtgtgaaagcatgcaaaatgatctgacatattctttacatttcaaaagtttctttccagtatgccttatcttatgtctttttgaatttgaacatttatgaaagatgtttgcatatttgccacattgaaatactttgctttgtgtagttgtcaaactctggttaagcttattataaccttttttgtgcaccttacactcatccacattggtacaaccaatttttaactgtaaattctcatgtccacatttttcatatcttctcaatatcactttttggaaagaatcttctctgccctgctctggccaaaggtcttgagcaaaatgagaacatataactgaaaagaaataaaaataacaaattagtccacttattagataaatatagtttccaaatttaacctataaaattattcaaactacataagcaagatgacactgcagtatgacacaggccctaattcttcacagacatataaatgtaataaaagcatacagaccaaaatacatatgtagataatttatacatgagttaagtgtgtacagtgtctgaattaagcccaatgcaaagagccacatagaaaaaaagaaaagtttgttaaatttacccaatcaactctttctgctcctcaatattacctagtcccttcagaagtaaattgtcaacttctgtttttttttctaaaggcaagtaaaatattggcacatacaatttaatttctgtcttctatgggcctttccacacactggtttctgtctcccatgacataaagtgctgaaagatatggtggtatacttagaaatgacagtttgagtctgttgagaccaaagataaatacaatgcagcagagcactgcagtgctgcaaagagagaaaaggtgtaacaagtaactacttttcagaagaaacataaataatctcttttaactaaaggtaagcacaaaatttcagacaagacaaatctgaagatgtttgagagacccacataatctctagccaagaccattgttttctgactacaccaggacaaagctatattataaatttttaaatgtccaaatctcaaagattacaatctatacaaaatagggcaatataatcccatcaaaaatattataaaattttcagaaagaaaccattaaaaatgtatatactaattttaaagattgaataatactctgagtgaaataggaacacaaaagactatagaaaatcagaaaaatgaggataagaacaaaaatatctacattgtggtgataaaaaatacaaaaagaaataactgattctaaaattaagataaaataatgtaaaaataaaaaacaagatcaaaaagcaaattaggatacacacaaatacatttataacaaaaacatatttataatcacaatttgaacagttacagacaaaaagagaatcttaggagctgcaagataaaagtgatttgcaaacatagtcttatgagataaccagtgaattgtcaacaaaagatttacaggccagaagagaactgtgtgagatagtcaaagtcctaaaaaaaaaaaaaaaatagctatcaagtgagaataataccaaatcagcaaatctgtcctaatagaaaaaaaacctttcaaaataatcaaattcacaaaaagtatatcggcactgcatatgtcttccataggaaagatgctgaaagcagttcttaccactgaaaataacgtaacataaaaaaacaacacctagcgtttgagctctgctaagggtcagactgccacctcaagtgggtccctgacacccatgtctcctaattgggaggcacctcccagtagaagctgacagacacctcatacaggagagctctggctggcatctggcgggtggcctgtgggacgaagcttccagaggaatgaatgggcagcaatctttgctgttctgtagcctcagctggtgatacccaggaaaacagggtctggagtggacctccagcaagctccagcacatctgcagcagaggggcctgactgttaaaagaaaaactaacaaacagaaaggaacagaagcaacatctacaaaaaggatgtttactcagaaccccatctgaaggtcatcaacatcaaagaccaaaggtagataaatccataaagatggggagaagccagtgtaaaaaggctgaaaattccaaaaaccagaatgccttttctcctacaaaggatcacaactcctcaccagcaaacaaacaaaactgaacagagaatgagtttgacaaattgacagaagtagtcttcagaggtgggtgggtaataacaaactcctccgagctaaaggagcatgctctaacccaatgccaggaagctaagaaccttgaaaagaggttagacgaattgctaacaggaagaaccagtttagagaagaacataaatcacctgatggagatgaaaaacacagcatgagaacttcgtgatacatgcaaaagtatcaatagctgaatcgataaagtggaagaaaggatatcagagactgaagatcaacttaatgaaataaagcaagaagacaagattagagaaaaaaagaataaaaagaaatgaacaaagcctccaagaaatatgggactatgtgaaaagaccaaatctacatttgatcggggtacctgaaagtgatggggagaatggaaccaagttggaaaacactcttcaggatatcatccaggagaacatccccaacctagcaagacaggccaacattcaaagtcaggaaatacagagaacaccacaaagatactactcgagaagagcaaccccaagacacataattgtcagattcaccaaggttgaaatgaagaaaaaatgttgagggcagccagagagaaaggtcgagatacccaaatggaagcccatcagactaaaagtggatctctctgcagaaaccctacaagccagaagagactgggagccaatattcaacattcttaaagaaaggaatttcaacccagaatttaatatccagccaaactaagcttcataagtgaaggagaaataaaatcctttacagacaagcaaatgctgagattttgtcaccagcaggcctgccttacaagagctcctgaaggaagcactaaacatacaaaggaacgactggtaccagccactgcaaaaacataccaaattgtaaagaccatcaacactatgaagaaactgcatcaactaatgggcaaaataaccagctagcatcataatgacaggatgaaattcacacataacaacattaaccttaaatgtaaatgggctaaatgcccccaattaaaagacacagactagcaaattgaatagagtcaagatccatctaagtgctgtattcaagagacccatctcatgtgcaaagacatacatagactcaaaataaatggatagaggaatagttaccaagcaaatggaaagcaaaaaaaaaaaagaaacaaaaaaaaaaaaaacaggggttgcaatcctagtctctgataaaacagactttaaaccaacaaagatcaaaagagacaaagatgggcattacataatggtaaaggggtcaatgcaacaagaagagctaactatcctaaatatgtatgcacccaatacaggagcacctagaatcataaagcaagttcttagggatctacaaagagacttagattcccacactataatagtgggagactttaacaccccactgtcaatattagccccatcaatgagacagaacactaacaaggatattcaggatgtgaactcagctctggaccaagcagacctaacagacatctacagaactctttaccccaaatcaacagaatatacattcttctcaacaccacatcacacttattctaaaactgaccacataattggaagtaaaacactcctcagcaaatgtaaaagaatggaaatcgtaacagtctctcagaccacagtgcaatcaaattagaactcaggattaagaaactcacccaaaaccacacaacatggaaacggaacaacctgctcctgaatgactacagggtaaataacaaaatgaaagcagaaataaaaaagttctttgaaaccaatgagaacaaagacacaacataccagaatctctgggacacagacaaagcagtgcctagaggaaaattcacagcactaaatgcccacgagagaaagcaggaaagatctaaaatagacatgctaaaatcacaattaaaagaactggagaagcaagaacaaataaattcaaaccctagcagaagataacaaataactaagaacagagcagaacagaaggagagacagacacaaaatacccttcaaaaaaaaaaaaattcaatgaatccaggggctgattttttgaaaagatcaacaaatagataagactgctagccagtctaataaagaagaaaggagagaatcaaatagatgcaatcaaaaataataaaggggacatcagcactgattccacagaaatacaaactaccatcagagaatactataaacatctctaagcaaataaactagaaaatctagaagaaatgaataaattcctggacacatgcacccttccaagtctaaatcaggaagaagtcagatccctgaataggccaataacaagttctaaaatttaggcagtaattattagcccatcaataaaaaatgtccaggacctgatggattcacagctgaattctaccagaggtacaaagaagagctgatcctattctttctgaaactattccaaacaatacaaaaggagggaagcctccctaactttgtatcaggccagcatcatcctgatacaaaaacctggcagagacacaacaacaacagaaaaatttcagtccaatatccctgatgaacatggatgcaaaaatcctcaataaaatacttgcaaactgaatccagcagcacatcaaaaagcttatccaccacgatcaagttggcttcatccctgggatgcaaggctggttcaacatatgcaaatcaataaacgtaatccatcacataaacaggaaccaatgataaaaaccacatgattatctcaatagatgcagaaaaggccttcgacaaaattcaataccccttcatgctaaaaactctcaataaactaggtattgatggaacgtatctcaaaataataagagctatttatgacaaacccacagacaatgtcatactgaatggccaaaaaccagaagcactccctttgaaaaccggcacaagacaaggatgccctccctcaccactcccattcaacatagtattggaagttctggtgagggcaatcaggcaagaaaaagaaataaaaggtattcaaataggaaaagaggaagtcacactttctctatctgcagatgacatgatttagaaaaccccattgtctcagcccaaaatctctttaagctgataagcaacttcagcaaagtctcaggacacaaaatcaatgtgcaaaaatcacaagcattcctatacaccaataatagagagccaaatcatgactgagctcccattcacaattgctacaaagagaataaaatacctaggaatacaacttccaagggatgtgaaggacctcttcaaggagaactacaaaccactgctcaagaaaataagagaggacacaaacaaatggaagaacattacatgctcatggataggaagaatcaatattgtgaaaatggccatacggcccaaagtaatttatagattcaacactattccatcaagctaccattaactttctttacagattttgaaaaaactaaatttaatatggaaccaaaaaaaagctcatatagccaatcctaagcaaaaagaacaaagctggaggcatcatgctacctgacttgtagtatcgaactacactacaaggctacagtaacaaaaacagtacggtactggtatcaaaacagatatatagaccaatggaacagaacagaggcctcagaaataacaacacagatctacagccatctgatctttgagaaatctgaaaaaaacaagcaatggggaaacgattccctatttaataaatggtgttgaaaaaactggctagccatactcagaaaactgaactggaccccttccttataccttatataaaaattaactcaagatggattacagacttaaatgtaacaccccaaaccataaaaaccctagaagaaaacctagacaatgccattcaggacacaggcatgggcaaagacttcatgactaaatcaccaacagcaatggcagcaaaagccaaattgacaaacgggacctaattaaactaaagagcttctgcacagcaaaacaaactatcatcagagtgaacaggcaacctacaggatgggagaaaaattttgcaatctagccatctgacaaagggctaatatccaggatctataaagaacttaaacaaatttacaagaaaaaaaaaacaccccatcaaaaagtgggcaaaggatatgaacagatacttctcaaaaaaagacatttatgtggccaacaaacatgaaaaaaagctcatcatcactggtcattagagaaatgcaaatgaaaaccacaatgagtaccatttcatgccagttagaatggtgatcattaaaaagtcaggtaacaacagatgctggagaagatgtggagaagtaggaatgcttttacactgttggtgggagtgtaaattagttcagccattgtggaagacaatgtggtgattcctcaaggatctagaactagaaataccatttgatccagcaatcccattgctgggtatatacgctcaaaattataaatcattctactataaagacacatgcatgcatacgtttattgcagcactattcacaatagcaaagatttggaaccaacccaaatgcccatcagtaatagactggataaagaaaatgtggcacatatataccacggaatactatgcagccataaaaaaggatgagtccatgtcctttgcagagacatggataaagctggaaaccatcattctcagcaaagtaacacaagaacagaaaatcaaactagcatgttgtcactcataagtgggagttgaacaacgacaacacagggacacaggaaggggaacatcacacaccagggcctgtcggggagtgggaggctaggggatgaataacattaggagaaatacctaatgtagataacgggttgatgggtacagcaaaccaccatggcacgtgcatacctacgtaacaaacctgcacgttctgcacatgtgccccagaatttaaagtataataaaaaaaatcaaaacagaatattaacaaggaaacggactacttaaaggtggtataaaacaactatttctgacagaggtatagacagcactcctcaacatcgggatatacacccttctcaatagctcatacaacatatttcttgatagaccacctcttaggccaaaaaagaagtcttaccaaattttttaaaactgaaattttatgaattattttctatgactaaactcaaatgcaagtatacaataatagaaaaaaattgaaaaaaaaatatgccaggcatgggtggctcacgcctgtaatcccagcactttgggaggccgaggtgggtggatcacctgaggtcaggagatagagaccattctggccaacatagtgaaaccctgtctctactaaaatgtgaaaaactagccaggcttggtggcatgcacctgtagtcccagctactcaggaggctgaggcaaaggaatcgcttgaacccgggaggcagaggttgcagtgagccaagattgtgccgctacactccagcctggagatagagcgagactccatctcaaaaaaaaaaaaaaaaaaatacacacacacacacacacacacacacacacacacacacatatacacacacataggaatttaacaaaacactcaagcatgctcttatgcaaatgttgtaatagttaacattgtaaagatgttcatcctggtcaatgtaatctacaaatttaatgaaatgtttttcaaatttctcattgcatttttgaagaaatagaaacagtaaccccaaaagtatatagaatttcaaaagacaataaagttcccaacaatcttaaaataataataataataataaagcaatattgcaggcattaaagttcctgatttcaaaagacattccaagctacagaattaaaacaatctggtataaggatgaaaaattagactaatgaaatagaatgcaacacatatatatactttaacatgtatggtcatatgaggagtcatttacatagcaataattattactgtaagctaataggtaaaggcaatgcaaatttctgtcaccaaatcattcagtaaatataatctgaaatataaaaatactggaatatcactcagttttcaaaaagcagaaaatgttctaccaattataaagataaatcttgataacattatgcaaaatgaaatgagtcagctgcaaaaagacaaagattatatgagatatatagctataaagcatttacactcttagaagcagataaaaagaaaaaggtgccctatttgcttaacccccaacagcaagaaagtctgtcagtcatccatgacaaaaatgtcttaatgagagaaccaggcagcatggttaatatctgtaatgacagctacatggtacagtaaggttgaagaattgcttcaggccaaaattttaagaccaacctgggttatgcagtgagaccccatctcaaaaataagtgcctttaagagagctttgagatccagggaggcaattgtgaaactttgctaaagcccaagattgaggagcacccttttcagaaggcaagctttcattcaggtggcaaactacaggacccctgctcttgactacagaccagaaaatgtcccacccaacttggtcccactgaaaattttgaacttactctgtaatcatcccaaactcctcccagccacagtctgtgagaggtcttgggtcttccagaggcctggagagtgatacccatttagagcaatgctggcaggcctgcagaccttggtcccaatagcagttccaagactcagttccagcttcctaagccacagttcatggccagttctgcctatgtagaaatccacagtgacctcagaaatcctctctggtactcagtgaaagccatactaatccacatcctaatataaagcccaccatatgcagacctgactgcagaaacctgccctagcatctaccctactgagcaaagtcctgaaggatatttactctgtccaaaaataaaatgggaattacaactacccaagccccttgtaataagctaaccctagtgcagagccagcagccttgtgaccaagctacaaccccactctactacaaacccagagggcattctatcacgctggaggcccaacaaaagatttttaccctctgaaaccagtttataaaaactttaagaggtgtttgcgccttcaaattgagacaccaatggaaaagtatattgtgcccattgtcaatgcttctattttaacacagcacttgacgtatgtggaagaaaaattagtcaaaaaaattttaaagtcattgaaattgaagacaaataagtaaaacattgctgcttgtagatcatgcagtgttctctataaaaaaaaccataaacagtacattaaaaccttttaaaatacactcagtaaattagcaaaatataaaattaacatataagttatgattccatacacttaaactatctgataaaatagaggaagaaaacaatcttatttacaatagcactaaaataataaatatccgagaacaaatttaaccgaggagctgaaaaacttttcaagtgaaagatttatcaatgaaaaatgagagaacacaaataaattgaaatatattttgtctatcgattcaaagaataaatgttaaaatgccatattatccaaagtggtctctagattcaataaactctctatcaatattccagtggttttttttcacagtaatgaaaaatacaatcataaaatttacatgaaactacaagaaactgtgaatagccaaggaaatcttgaggaaaaagaaaaaagcaggacaacatactttataatttcaaactatatttcaagactatagtaataaaaacaggatgaaatgtacagaaaaatgaacaaaaaacacccaatgatacagaaaccactactctcacatatttcagagatgatggaaaaagagaacttaaaagatagtttaacatggagtaccttaaaattatggaaatatctgtgtccacaaaaacaaaaacaaaaaaactcagattgtgcactctcttgtatgccatgaacagtactttggctgtcactgtaaacttgaaggaagattactgaagggaaaaaataattcttagaaattttaaaagcataagacagaagatgccactgtgtgagagaaaattaaaaaataaaaataaaaattaggctttccagaaactatttcttttggaacacagcttcccatatcactttaaggactggctttctccttgactttggacctctcatccatgttgtctgtattcattctcacctacctggcggttctttcaccagctcatgtctcttcatattccagggctcttttccttgctccagaaaaatgatcaggtctggcttaggggcagcaatacctgttttattaaaaatgagtaacatgcatcttgctcatattctccaattaacaacttagtaatgtgctcagtaaagaggatgtgatagaatattctaatacatttatcccaaaatactaaattacaacagaaatttctaaatatttagaaaacactctaattttgtaagttcttaattttatcacctggtactactgaattaaaaattggtggtggaaattagattttaaggtgtgagcaccagtatttatgccagtaaaattttgaaattaccattaatctaaagtgaaggacagagatcagctcaagaatgtggttaagttaaggtcaagatgaaacatcttgaaatttttttctctatggaaaaatccctatgattttcttgaaaacagaaatctgaaagcataaattaccaaaaagaaattatacaaaagagaaatgatgttgggagccgaaaggctgagggttgtgaccaactcagcattccactggaggctatatgatcaaacagcaaactgtttatcatgaatgcagaatgtgggcgaattcgcttctgctcctgccgccacaaggtacactaaggacagtcaccccctggtgccatgcttcttgaggttatctactggaacatctgcagagtactgtttaaagaatacagtcatgcagggttgtactaagtcaagcagctgaccacaacctcccccttctccctatctcctttactcaataaatatgaagggctatagaagctcagggcccttgttcactagaagcaaagagccccctggtgccgtcttccaaatatactcttttgtctgcctttattcctgcattcatcctcctttgtccaggccaataaagtccacagcaaaatgaaacctatagtgtatactaggaattgcgtattaaagttattctcacccaggaagaccaggtttctgtagttctctaacatcacattcctatataaattctgctgtgcagtgtccaggcattgccactcctccagagagaattgtatggccacatcccgaaatgtcaacgatccctggaaaacacacacaaacacacatatttaccaagtggtcatgggcagaatttttaatttgactcaaggtaaaatggaaagagtaaaaagagctcattctgacttacaggagtgactgaaatcattcaataaaatagttttcaacacaacaatattctctaatgtattctctaactctgagaaaagaaagtggtataagatccataacatcagtgtatgtatagtatttttctagataataaagtataaacttgagggcataaacactaacatgtacaattttgagtgctatatttacatcaaacagaattaattgtgtgccaggcgtggtggctcatgcctgtaatcccagcactttgggaggccaaggcgggcagatcacctgaggtcgggagttttagaccagcctgaccaacatggagaaaccacgtctgtactaaaaatacaaaattagctgggtgtggtggtgtgtgcttgtaattctagctacttgggaggctgaggcaggagaatcgcttgaacccaggaggcggacgttgtggtgagccgagatcatgccattgccctccagcctgggcaacaagagcgaaactccatctcaaaaaaaaaaaaaaaaaaaaaaaaagaattaattgtttgtatttttcagatggaaaagacatagttgtgtatattgttcagatggaatagacatgttgagttagaaggtatcactcaaattttaatgtgtacaataagctggagatcccattaatgcagattattatttttttttttcagaacatcagggataaagtctgagttgctgaatttttaaaaagctcatcagtatgccaatggttttggcccaaaaagactattttgtcaaatacccagtaattgaatgagcctgtgtttttctcagtttttctggtttgtaaacaaagattctcatcttcatttcccaaaaacagacaaatgcaaaggaaacctaagaaagaagggcagctgccagattaaatgtgttggtttgttcacatcagctgcataaagatacttaacgatgaacagaaaaataattctatagtgaaaaaatgtgtcggagagcttatcaaccaagtgatttattaacatcaactacactagaacaaatttttataatgtcctgatgcacccagaaggatacagcattactactgagatattaccccccaaaaggtaaattatagtctgaatttaaccataaggaaacattagtttaatggaaagttcaagatacagatatctcccatgttctgtaatttttaatagtgattttaaatagtctttctttagcactgtagagagcagttatctcctataaatttttttagaatttcctgggtaataaatactatactgcttcaatgagtggtttcttaatcctgtactgcatagacataataaggaacacagacaaaacctcaacattacatgttctctgccttcactaaaaaccccaggttttccccaataggaattttgagtatctacaccttcccatgttcaacagccacaaagggacattttaaatattgcagattataaaatcatagtgagatttctgcacggcatataagaagccataatgtagagaaggctctggtatatagaaaaaaatatatttttcagagactttgactattgtaagaattttttaaagtagttaagacaaactcattagggaggaaaaacacaagtagagaagtacaggtttgcaagtactaaatgtatgtttcctggaggaagcagagtggacacagatcttgatctgagacacatttagctgaaaaaaaaaaaggtcatttttttctctttctcctccttttctaggattctttctcagataaaattctctggacaaattacacctgcatcttgagaagatgcctttaaaagagtcagcaccacaggtctacctgctgtcaccacatccacaggcagaaggaccaagacagaaaaactccacccaattctgtcctttatagcagaagagatgaagaaacaatgagtagctccagagataaaaatatgcttttctttattttgtcctcgggagccatcccctgacacaggcaacagcaatttctgccacagtaatggaaatatgggccacgctgtcctgcccctaccaaatccaaacagaacaggttcttggaccaccctttaatgcaaagatggaacttaactctcatgaatgtattatgaattcctcatacttgattctggcctcaccttagagtcacatgagccacttaattaaaacaacatggatgcttccacaagaacaataaacagaatccatggaaagggcacaagtaaaaagagttctgcaaaatggccaggtgatactatttagcggcctgggctgataaccccttaactaagactaagcatttcctctcaagctctaacgagcttataaatcacttggtaattttctccccactctatgaaatgtaattctgcaggtatggaaagggtccacaaatgggtcttttaaacaagtgcgctgtcagtaatgatgttgttcccactgggcttattattacccttaattagaaaaatgaggcacaacacagagtcccttacacccagcactcttgtcacaacacaaatacttctggtacaaatgaagacaaacattcttcatcctaaagtattatattctttgctgactaaagtttacagagaaaatagaaagcagcaatttctgagtaagtctgcatttggaaaacaacatgtgcacatgtactaatgtaatttttattaagcaggtattatgtgatgttacagagtgctgtgatagcacattatgtgatttaatcctaataacaccctgtgagttgatactaagtgttcagtaattccaacactttaaaggacccagcatttttatttctatttctgtttatctgtcactgattttttcaaaaaatgcatagaaaaggtaaatatagacagatgaaagggatacagatggaaagaatttaatgcaatttagataaatttttattgtgtttatatttactttcttgtgacttgtgaatcaactactagatctgcaggaacagaaaacagttgctaaataatgtttctgcaagcactggttttaataaaaaatttgaaaagatcctacaatacatactttatatttcccgttatctgcttttgggtttcagaaaatgttgagcaccagctctaaaaaggcaacaggattcatgactcaaaactctgatttcctgtaatcagttctgtgaggcaagactccggggtagagccagacataaataaggcctccaaaaagggtgaatatgaacagggctggggcagagcgtacagccaatgtacaattctgttctctatgccactggggggtattgtcagttctttttgttaaagcttacttaagtaaacttaaatctgagtttgtataattttaatcttttttatcactgtcctgtgaattttatattatatgctaataagcaattttaaaaatcccttaaggttttctagaataattttttagaagaaaaataagtattcttagcagggtaaaataaatacaaataacaatgacgactcttctaagttcagctgtagacatcagaagccacaatataaagtggcccaaataaagcccaagtttttgcacacagctatttattgtacccaccatatgatgtataattcaaccatatttccagttgctagtctagactaaaactgccaggatggtaggaaccatgactgcttcatctatttttcttttctttttccttttttttgagactgagtctcactttgttgcccaggctggagtgcaatggtgtgatctcggctcactgcagcctccgcttcccaggttcaagcgattctcctgcctcagcctcccaagtaaccaggactataggcatgagccaccacaccaggctaatttttgtatttttagtagagacgggatttcactatgttggccaggctggtctcgaactcctgacctcaggtgatccacccaccttggcttcccaaagtgctgggattacaggtatgagtcactgcaccccacctgcttcatctattttttttttatgactatatgaaatggaagcaattagtttatctgtttgagcccaattagtttatctgtctgagcctcgagacctcctgattttttacccgagtacagggaacttgaaaaactctcttctgggtaccaaccaaagatacttcttgtataaggggagaaacaaacacaagatgactcatttctctcacaatgggacagaagcagaatttgtcactcttatcagcctgacacaattctgttctggacattctcaaatgtctcaaagattcagaggtgattgtgagagggttccccatgaccctgggctgatggtccactgataagccaggcagagaagactcgggatgattctaaataaaaaatggaactgccttggttgaactcccaaacctgggtcatccatcctgatttgctagctgtcctgatttgctagctggtgggtaagtagaaggacaagaatactttactccagtatcacattttacaggtagatatagttgtggtcatggctctggatactttgtggccttaagatgcttgtttacacttagagattctgccatcagattctatttactccgggagcctctcacatacctgtggcagattaatgaagaagatgtgaaaaggtcaaaaagccacactctcaaaagaggaatttaaaatgtctatgttgatatctcacaatgcagaaaatgcctcctgttggttttctgtaaattctcaatccaaagtctggccctgccttgtaaatcccaggcagaggccagccagatcttatttgcagattctaggtgaaatcaacctcactctgcatttttgggtgttacagcaagtagagtgaaatcaaaggagagattccctcatagaggctgctctagaacattctaaataatattttaccttaaaaaagctgacacaacatgaacataagcagacagtttatttgggtcaagcttaaggattttaacttgagaccaaatattcaagttgcctggaatccacgctttcattagcagcacttacaagtggatttgcaaaggcaaaaaaaaaggaacagtgagtgagctgatacaaaattggttgcgagaaattcttatttatgtaaagaaataactttaataattaattggatatacattgttaaggttaaggatatggaatacagtgtccagtgtggaattattagtttaatttatagctacttgtggcaatagtgaacagtttcaagagatacatagctgaaaaaaagggagaaaaacatgattgtgctctcattttaatgcctctctgagtctgataactaaaaggacttgcattcctcagacaaaaactttttttttcttctcaattctcaagacctagatttagaatttggagctgcaaattcaggtcctgcatgggtaaaatagcagcaagtgttacctgaacatttgtgggcattttagcatgaggagggagggagaagtggattctcatgtctacaggtctgctcaatgcacatattttactctgattgggccccatggtcactgaatcagtttcaggtctgaggacacaagagtcactgaaagaggtaaaatggctaatatctgaccaatgaagtctgtagaaatctggtctagcctctctaaaagtgactctagacatgatagataccaagtaggcagacgcacaattccacctgcatatttaggggacagcatgcacttcacagcacaattgtgaactgactggaagccgaaaaggcccatctagagtaaagcttagttggcaccttatgtgtttacattatgtctggtaattctagacaggatttggaaaatataattaaaagcaaaattttcttcagccccagaggaactgcacagtaacagaacagaaagaaaactgttttattacacaattacatgtgaatgtgacatgcattacagtcaatttgctcaagagattgcaaagacagaaagacagtgaccataatcagtctacaagtagaatttacagcaccatgtcatacatagttcatcctaaattcatctggtagttgggaaggccatccatgtatgctaattggttataatcaatgacaaaataaacttttcacatcttcatgactggaggtagttttgcaacttgaaccccggtgcctgctgaaggtaggctttgactcttctacaaaaattgttgattcgggtgctatctttttggctctttacattttaaagcaataggtctctactccctgagcactgggcttgagtactcctgtttccctctcctggtggctagtgtactctcttgacccctaccatctgccactgaggcacagcccacagcacagggctcacagctggaaactcacatcttaggtgaaccccaattgccacagcagcactccagtgccacatcagacagtgaagcctgagcagcaggaggagagcttgcaggcctcctgggtagaattgcaccttcacaataatagaaaagggagcactgtttcagcctcagtttttatttataatggtggcatgaaaaaaatactgctgggttttggcatgagtccagatagagatagctctgagagttctcactgtgacagcccacgtctttcacagacaccatgggactaatagggtttctgaaacagacacacaatgcatttgagagaaaaacagctctcattctgagaaagattatattgaaagaaaaaagttaaaagtgtcttaagaaaaaactgagattggatataagattgatcaagtcagccagaaaatatctccctaagaagaatttctctccaaacacccaagtgcatagctactctcagcaagagaaacaggagcattattgaataaagggggcatattctcagcagaatttttttttttttttgagatggagtttcaatcttgttgcctaggctggagtgcaatggcgtgatcttggctcactgcaacctctgcctcctgggttcaagtgattctcctgtctgagcctcacaaatagctgggactataggcacgcgccaccacacccagctaattttgtattttctgtagagacaaggtttcactatgttgtccaggctggtctcagactcctgacctcaggtgatccacccaccttggcctcccaaaatcctgggattagaggcatgagccactgcacccagctctcagcagaattttaaaagatttatcttccatctctgctgctctcttatttcctaaccattgaatgtgagatctatattggaatatatctgacaacttccagtagcacttttttataaaaaattgaaatctgtgttaatatagtagaatatattagagcttgcaacatagctaactggagagctattatggtttttgggtagccatatcatctgtctttatttgtcctgtaatagcagcataccaatttggtaaaatataagacactaaaattatgcttacctataattattcccactggataaattaatagcatgtcagactaatatctactgcaacgatttaatggtaaatttttttggatatcagatataaatatataagtatgaataattttatgtactagtcataaggtatgtaatattttaaaaaattatctgaactgtaattcagttgaaacactgtatttcaaaagtatgaataacaatattaaaataactaaggaattcaatcaaagtaaatattgtggccttatattcatactattgtagaaaatactgtttaatttatatgaatgcaggttgtctacaaacactacacataactatactaactgtactgaagtaacccaagtacaacagactccactgttcagtttatacactgaactcttctggcttttgcagtgtaagtatgtcagcctgcaaataatcaccttggataatcaggtttctgccaaagaacttactcagtatcttttagtctatattattctgcattgctaaatttattccgatctttgtgctcaacttttttatgctcttgaaatgaagtttactctgaacaaatctgtgtctagtttaaagactaaagaaagataaaaaaatataaccttttgccaagacaaaaagaaagcaatgaatctcaggtcccagataaagacaattctgagtcaaaaagaatgacaaaaggtttgtttcattgttaatatgatttacatatacttcaaaaagcagaagaaatatatacatataatctaaacttttttttaaaaaattaacaagttatcctcccttattttcacatatgagaataaaacctcttattgctaatttatattttctcttacaacagccaggtctctggacaagttcttgaactcttggatctctgaattttgcacagtgtgtgcacttgaaaggatgtttatggggggaaaagcagaagagagaaagatgttattaagaaaccccatgggttcacatgaataaagcaagttcttagagacctatgaagagacttagaatctgacacagtaataatcagagactacatctgacaagcactaatggacagatcattgaagaagaaaattaacaacaatattaggacctgaactcaacacttgaccaaatagtcctaatacacatctacagaactcttcatctaaaaataccataatatacattcttctcatcaccacgtggcacatactctaaaactgaccacacaatcagaaataaaacaattctcagcaaattcaaaaatcccaaaatgacacaaaccacacacacgggctacagcttaagaaaaatataattcaataccaataaaacaactggaaaccatacaattaaataaaaattaaatggcctacacctacacttgaataactttttggtaaataatgaaattaaagcagaaaccaagaagtgttttgaaacaaataagaacaaaaatacaaaataccagaatccctgcaatacagctaaggcagtgttaaaagaaaaattcatagcgttaaatcctcacatcagaaagttagatctcagtttaacaacctgatatcataaataaaagactgagagcagtaaaagcaaatcagtccctaagctagcaaaggcaagaagtaaccaaaatcggatctgaactgaaggagatttagacatgaaaaactacaaaatatcaagaaatcctggcattaaatctatttaaaaaaaaaaaaaaggaaataaactactagctaggttaatgaagatacgaataaacacaattagaaatgagaaaaagagacattaccactaacctcacaaaaatatactgaagtctgctatgcacataaaaaaaaatctagaagaaatgaaaaaattcttcaaaggacacaaatgtggctaacaagcatataaaaaaatgctcatcactgatcattagagaaatgcaaaagaaaaaccacaacaagaaatcatctcaaaccagtgagaacggccattattataattcaaccattgtgaaaagcagtgtgttgattcctcactaaactaaaaacaaaattaccatttgacccagtaacctcacaattgggtatatacctaaaaatatataaattattctatcataaagacacatgcacaatcacattcattgcagcactattcacaacagcaaagacacggaatcaacctaaatgcctatcaatggtagactggataaagaaaatatggtatggttgggcatgatggcacatgcctgtaatccagcactttgggggccaagccaggtggattgcctgagctcaggagtttgagaccggcatggacaacatagcaaaatcccatctataaaaaaaaaaaaaacataaagaaaaattagctaggcatggtggcacaagactttagtcttagctacttgggaagcttaagtagaagaggactgcttgagcctgagaggttgagagtcagcacagaccctgattcagggctcagtcccacaacattgtcctcactgcagatgccagtcacaaacttcatgggctcatctatgcttctgacctactgtttaaaaattggggactcccataacctttctgaaattcaataatctgatagagctactcacagaactcagcagaacactgtagttatatttacaggtttcaaataaaatatacaacccccaaaaagtcaaatggaagaaaagtatagaaccaagaaaagaggtgggaaaagatgaagcatatagataataaatagctgtgattaataaaattctctatcctctgtgttctccagtaacactttatgaaaagaaacacccttcccattatgacttagatggtactctctttacttacctaatacacagccaggaaaacactctgcatattttcttctttttctcattaaaaaagcagctgagtttgtcttcagtggtcaacataaaatacttcttaatcaaaattcacttgtttattttcttcccacaggctcctgaactctgagctatgctcagtctgagccaccatacaacctcattttatgtccctactaagaacacacagactttagggtaaaacattgtctgatctaaaatctgattatttcacccttcatttaaacattcccctcaccttttttctaatcttatttgcttttccctaggaaaaaaagcccttttctacctaatctttgcaatccttaaagatcttatagttggtacttcctcctgttgcaatactcctttggaattcttttttttttatatatacatctaactggtttattttaaaatctctcaaaactgcctcaaaaaagtaacaattttatcttcagtaagacactcccaaaccccttctatcttaaccttaactgcatctgtctgtggggccccagctttccaaggctctgtagcttctctcactatagaggcttcttccatggctggggtaagcaggctgggacatctgcaggaaaggctttccagaaggaactaactgggcctttaataacctccttttgccggctcaaaattaaccttcgctcgcagtcattgggctcaagctttaattaccatgtcagagtcattcacttagtttttgaaaataagtgtttgaaaaatccagcaaaatgattcaaaaacatataagaaaattttaaggtgcttacattttgtacctcagtaagagaagcaaatgtatttatttcttttggacaataaagtattattttattttttgtattaaaaatcatgtggtaaacagttacatgggaacacttctaggaggtaccaaatttcatcagataaaatttagcattaaactcagaaattgaaataacaggatatagaacaaagatatttactttagcaagtttaccctgcaaaaaaagaaactgatgttttcatgaaactatgtaactcaccaattatctaccacattttcttgtggaaatacattaattctctacagccgaaatggaagaaaaatttttcttattttttttccttggtagctaacattctaaaagctagatggaattctgtttgaaatcattcagccataaaaaacacacctgaaggccaggcatggtggcttacgcctgtaatcccagcactttgtggggccaaggcaggtggatcatgaggtcaggagatcgagaccaccctggctaacatggctaatatggcgaaaccccgtctctactaaaaatacaaaaaaattagctgggtgtggtggcgggcgcctgtagtcccagctactcgggagactgaagcaggagaatggcgtaaaccctggagacagagcttgcagtgagccgagatcccaccattgcactccagcctgggtgacagagcaagactctgcctcaaaaaaacaaaaaaacaaaaaaaaaaacaccagagaaaactcctaaattcactctgagaaagaaaaaggtgaatgagaattttcaacaaataaaatatacagatattattttctgaaactcacctttttatgctctttgtaaatattttcttacctttcaagccctactaataaaatgcaatttacagttaaaaaactgaggtcagccgggcacagtggctcacacctgcaatcccagcactttgggaggccaaggtgggcagattacttgaggtcagaattttcagctcaaacagcctggtcaacatggcaaacccccatctctactaaaaatacaaaaagtagccaggtgtggtggtgggcacctgtagtcccacctacttgggaggctgaggcatgagaatcacttgaactcgtgatgcagaggttgcagtgagccaagattgcaccactgcactacagcctgggcgacagaggaaaacactgtcaaaaaaaaaaaaaaaaaaaaccaaaaaaaaaaaaaccctgaggtcaaaataagtgaacaatgcatttaatcatgtcaaggtacggatatgtctgactcatgtgtcaagtcaggccatccaattacttgagagattctcccaccccatcctgttcacttaagtgctcaataatcattctctcaggagactctgaactatgccccagagtgccccaggtatattttactttgcaagtttttgcaccatctcactggggtcagttgtttttgtctttggagtgctattttatttcacaaaccttttaccatttttatttcactatttttctgtcccctaagagaatgcaggggcaaaaattattttggtttccccttcaataccagcatctgattgtctgaacagcaatgtgtctccaagaaatggaagctgggttgggtaaagacaatattaatatctcaagggagtagctttccaaaaaaacagcacaccagaagatgactcagccacagtgcattcacctgctctcttgagaagctacgcttcatatctcaggttgtcttatgggagatcagaggctacactccatacctcaggttgtcttatgggagaaaaagacccaggagctgatattcactagacactctcacagacatagccatggcgggtatcttggtttttccccagacagtactgaatctcaagtccaagaaaaaactgaagggtggctgaggacacatctccctataaagtttccaaagggaaatcttgacccaaaaacattgtgatatctgtgtctacggaaaacagaagaaaaaatatttacaaacagaaaacaaatctttttaaatgtgccatcaaatgctttgtcaaaaaatgattaaaataggtatcaaaatgtacactaaactatttgttgataatatgaataagggaggggaaattggcatttgggaatgtcagaaggaagtgaaaatcaagtattttactgcaagccagagtcaggccggagaaataggggatgggggatggacttgaggccctacttgggacacatgtgaaaaatgcaaggaaacagcagttccctgtggggtgtgaaaataattaagtggctggcagttagactgaggaggctgtagttcctaatttctacttttaaaaaatctaattcggccaggcgcggtggcttacacttgtaatcccagcactttgggaggccgaggcaggtggatcacttgaaatcaggagttcaagaccagcctgaccaacatggtgaaaccccatcgctattaaaaatacaaagttaacggggcgtggtggcgcatgcctgcaatcccagctacctgagaggctaaggcaggagaatcgcttgaacctgggaggcggagattgcagtgagcccagacggcgccattgcactccagccagggcgacagagtgagactttgtctcaaaaaaactaattcaaatgcattttttgtaaattactatattgggggaaaaaattcaggcttaacaaactataaactgccaattaacctctgattacataaccaagaaatttccatcttgatagtacgaattaagaaactacgtaactgtacctaaccaattatcgaatttggttttcttcattaggcaccttataaaactcttccgtcaaacctcttcaatagaccataaactacaacccatagctgggtgctctacaattttggaatcactctttggttaaattatttaatatttgtgcggtgacttctgcaaatttttaataggagaaaacaggggctgggaacctcacggaccaaagctctttccattcttgaacccacacgccgagtcaggattctcctgtgacgaccctcccatgctccctgcacatctgagagagactccgcgctgcgggtgcagagcggccccaagagggctccaggccagggcacaatcacagcgcagggaaaagacaggacgcccggggaccgggtgtcagcgcagccgccatcttatgcctgaagcggactgaggtcgagctaggcaaggagaacacggggcacagattgtggagctgactgagaggaggcctgagtcccgccacagccacttcccaccggttccaaccagcggctgccactctctcgggatgtcggacccggctgactcaccatttctaggcttccgggggtcctggcgacttagttgtgaatctcccaatacctgcaggtcacagggccatagaagctgggcctttaggagcggacgacacacagcagtaaggacgacaccttgacctccgcgtgcagcgagagccaacggtcctaccacatcccggaagccgccctgtccgctccagctgcgtgcctgattggacggtcccagtccagcgtccctgattggataatgtttaaggccccgccccttcaggccctgagtgacggaagatgttatcagatgctgggctgactgaagaaagagtgccagcccagtctgccgcaaaggccgggcgtgatggcttacgcctttaatcccatcggtttgggaggcggaggcggggggatcacctgaggtcagaagttcaagactagcctggtcgacctggtgaaactccttctctactaaaaatacaaaaattagttgggcgtggtggtgggcgcctgcaatcccagctactcaggaggctgaagcaggagaatcatttgaacccaggaggtggaggttgcagtgagccgagatcgggccattgcactccagcctgggcaacaagagtgaaacgccatctcaaaaaacaaaacaaaaaaccctaattttagtaaaatcttataaataaatccatcaaatttgtcatttttgaacgctctagattttcatatatattttataatctcttttttttatttgtttatctttttgagacagtctccctctgccgcccaggctggagtgcagtggcaggatctcggctaactgaaagctccgcctcccgggtgcaagtaattctcctccctcagcctccccagaagctgggattacaggcgcccgccaccacgccctgctaatttttgtttttttagtagagacagggtttcaccacgttgaggccaggctggtctgaaactactgacaggcaatccgcccaccttggcttcccaaagtgctgggattacaggcttgagccacggcgcccggccttataaacgcttataattttttaactctttcgattttattagacttttttttttaacttgaaacaacctttattttattttatttgagagtcttgctctgctggccaggctacagtgcaatggcatgatctcagctcactgcaacctccccctcttgggttcaagcgattctcctgcctcagcctcccgagtagctggattacaggcgccctccaccacacccagctaatttagcatggtggcctgaacctgtagtagcagctattcaggggctgaagtaggaggattgcctgagcccaggaggttgtgtctgcagtgagccctgatcaagccactgcactccattctgggtgacagagtgagaccctttctaaaaaaaaaaaaaaaaaaaagccaaagcatataaacttaaacttatgagagtttgggggttttatttttgtcttaaattattatatttcaatagttttggggtacaggtagtatttggttacatggataagttcttttgtggtgatttctgagatttcggtgcaccaatctcccaagtagagtgcgctgtacccaatgtgtactctttcatccctcatcccctctcccacccttcccactgagtgcccagagtccattatgtaattctttttaatttttaatttttttttttttgagacagagtttcacttgcctcggcctcccaaagtgctgagattacaagcgtgagccaccgcgcctggccccattttgtaatttttatgcctttgcatcttcatagcttagctcccacttataagtgaggacatacaatatttggggttttatctctttttttcttttcttttcttttttttttgagacggagtttgctgtaattacaggcatgagccaccatgcctggcctagtttttgatgttttgattatggtcttttctgtttgtttgtttgtttgtttttgatggagtctcgctctgtcgatctcggctcactgcaacctccgcctcctgggttcaagcgattctccagcctcagcctcccgagtagcagggattacagacccatgccatcgtgccctgctaatttttgtatttttagtagaggcggggttttaccatgttggccaagctggtctggaactcctgacctcaggtgatccaccagtctcggtctcccaaagtgctgggattacaggcatgagccaccatgaccagccaattatggtcattcttgcgagagtaaggtggtatcacgttgtggttttgatttgcatttccctgatcattaatcattagtgatattcagcattttttttctatgttggctatttgtatatcttcttttgagaattgtttaagtcccatctgtctttgtttttgttgcatttgctttggggttcttgttcgtgcactctttgcccaagtcaatgtctggaagagtttttccaatgctttagaattcgggtggtttcaggtcttagattaaagtatttgatccatcttgagttgatttttttataaggtgagagatgaagattcttttttttttttttttgagacggagtctcactctgttcccaggctggggtgcagtggcacgatctctgcctcccgggttcaagcaattatctgcctcagcctcccgagtagctgggattacaggcacccgccaccacacccggctaaattttttttgtagttttagtagagacggggtttcaccatcttggccaggctggtcttgaactcctgacctcgtgatccacccacctcgacctccctaagtgctgggataacaggtatgagccactgtgcccagccgaagatccagttttattcttcaatatgtggcttcccaattatgccagcatttattgaattgggtgttctttctccactttgtatctttgtttactttgtcaaagatcagttggctgtaaatatttgggttcatttctggtttcgctattctgtttcattggtctacatgtctatttttatacccatacaatgctgttttggtaactatagccttgtagtatagtttgaagtcatataatgtaatgccttcagatttttgtgtgtgtgtttttggttttattggttttttttttcttagtcttgctttgactttggaagctctctttttattttacataaattttaggattttttttagttctgtgaagaatgataatgttattttaatggaaattacattgaatttgtagattgtttttggtaggttgatcattgtcacagtaggattgctacccatccataagcatgaaatatgtttccatttgtttttgttgtctatgatttcttttagcagcattttgtagtttttctcatagagatctttcaccaccttggttagacatgttcctaattattttttttttttgcagctattttaaaatgagttgagttcttaatttaattcttagtttggtcactgttagcgtacaccagtgccactaacttgtgcacattgattttgtatcctgaaattttactgaatttatgtatcagattgaaaagcctttttttcttttttctttttgagacaaggtcttactctgttgcccaggctggagtgcagtagcatgatctctcggctcactgcaacctctgcctcctgggttcaagtgattctcctgtctcagcttccctagtagctggaattacagcctcttgccactgcgcctggctaatttttgtattcttagtagagacagggttttaccatgttggctaggctggtcttgaactcctgacctcagatgatccacctgcctccacctccccaagtgctgggattacaggcttgagccactgcacctggccctaaaagctttttagatgagtatttagggtttcccagctatacaattatatcattggtaaaaagtgacaatttgacttcctctttaccaatgttgtttattttttgctttactctgattgctctggccaagacttccattactatgttgaatagaagcggtgagagtgggcattattgtcttgttccagttctcagaaaaaatcctttcaactttttcccgttcagtgtaatgttggctgtttatcatagacagctttttttttcttttttctttctttttttcagacagagtcttgctctgtcgcccaggctggagtgcactggcacgatctccactcactgcaatttctgcctcccggactcaagcgattctcccgcctcagcctccccagtaactgggataacaggcacccaccatcatgcctggctaacttttgtagttttgtacagaccaggtttcaccatgttggccaggctgatctcaaactcctgacctcaggtgatttgcccaccttggcctcccaaagtgctgggattacaggcataagccaccgcgcccagcctgtcatagatggcttttatgaccttaaaatatgttccctctatcccgattttgctgaggattttaatcgtaaagggatgctggattttgccaaatgatttttctgtgtattttgagataatcatataatttttggttttaattctgtttatttgatgtataacatgtattgacttacctatgttaaatcatctctgcatccctggcataaaatgttctcgattatggtgtactatcttattaatatgctgctgtgttgggttagctagtattttatcgaagatttttgcattcatcaggaacattggtgtgtagttttcttttattatgtcttttcctgatcttggtattagagtgatattggcttcacagaatgacttaggaaggattgcatttttctctctcttttggaatagtttcagtaggactggtcccaattctttaaatgtcaggtagaattgagctacgaatccaccttgtcctggactttttttgttggcagtttgttttttgttttttttttcttgagtcttgctctgtcacccaggctggaatgtaatggtgcaatcttgactcactgcaacctctaacttctgggtttaagtgattctcctgactcagcctcccaagtagctgggattacaggccagcttgtgacctggctaatttttgtattttaagtagagatgggttttgccatgttgatcaggctgatctcaaacccctgacctcaaatgatccacccacctcatcctaccaaagtgctaggattacaggcatgagccactgtacccagccagcaattttttattattagtttaatcttgctacttgttattggtctcttcagggtttttatttcttcctggtttaatttaggagggttgtatattttcaggaatttatcgaactcctctaggttttctagtttgagcatgtaaaggtattcatagtagctttgaatgatcttttatttctaattgagcaaatttggaccttctgcttttctgggttaatctcactaatagtctgtcagtttggtttatcttttcaaatgactagcttattgttttatcttttatattttttaaatttcaattttatttagttctgctctgatctttgttattttttttttctgctgggtttggtttgttcttgtttctcttgttccttgaggtgtaatcttaggttgtttattgtggttttttgcactttttgatgtatgtatttcatactatgaactttcctcttagtactgcttttgctgtatcccagaagttttaatatgttgtgtcactattattcagtttagagaattatttaatttccatcttgatttcattgtgaacccaataatcattcaggagcagtttatttaattttcatgtatttgtatggttttgagtgttcctattggaattgatttctaattttattccactgtggcctaagacagtacttgataaaattttgatattcttaaatttattcaggggctgggcatggtggctcatgctttaatcccagtactttgggaggccaaggcaggcagataacctgaggtcagaagttcaaaaccagcctagccaacatggtgaaaccccatctctactaaaaatacaaaaattaggaacgcatggtggcacatgcgtgtaatcccagctacccagaaggctgaggcaggagaatcccttgaacctgggaggcagaggttgctgtgagctaaaattgcaccattgcactccagccttggtgacagagcaagactctgtcacacacacacaaaaaaaaaaaaaaaaaaaaaattcagacttgtcttgtgacttatcatatggtctatcttgaagaatgttttgtgtgctgatgaaaagaatgtatattctgcagttgctgggtggaatattctgtaaatatctgttaagtccatttgttctaaggtatagtttaagcccattgatttttgtttgtttcactttctctcctgatggcctgtctaatgctgtaagtaaagtataagtctcccactgtttttgtgttgttgtctatctcattgcatttcttaagggacaacttaggtgaaacaagaaaatttgtatttctgaagcatagagttaatattttaggctaaaatatatttttttctttgagacagagtcttgctctgtcgcccaagctggaatgcagtggcatgatcttggctcactgcaacttctgcctcccaggttcaagtgattcttctgcctcagactcttgagtagctaggactgtaggcacccaccaccatgcatggctaattgttctgtttttagtagaaacaaggttttaccatattggccaggctggtttcgaactcctgacctcaggtgatctgccctccttggcctcccagagtgttgggattatgggtgtgagccactgctcctggccttaaatgtaccatttatggtttttttaatatataatattatatgatctgcaaacatcaactctttacttacttgtcatcaatttcagtggctttaaacaatttttttttttgcctaactcttctgctacatacttccagggttatgttaaaatggaagcattgacaatggggacaatatagttttgcattgcattggtttttgtaaatttcattgaacgaaaacctcttcaagtttatataaagtggttacaagaggtaaagatcccatatttataggatgccctcttcatttgtaatagacagaggtggtaggttggtcacaaggctgctggttctacatagggtttacctttagttggcttgttaaaaaaggcttgggtagttgtaattcccattttattattggacagactgaatatccttcaggactttcatctgtagagcagacactaggggaagttgttgcagtcaggtctgcatatggtggggcttacatcaggatgtggatgaggattcctttcactgagtactagagagggtcttcccaggtcactgtgtgggattctaccaaggcagaattgtccatgaactgtggcttggaactagaagtaaaacattaaactgtatggctacaaatgggaatcttcctccaggtctctggaagagcaggagctctcccaggctgtggctgggaggagtttggaatggttataaggtaagttcagaattctcagtgggagcaagttgggttggctattttttggtctgtagccaagaagagatgtcctgtagtttgccaccttaatagaagcctgtctcctgaaaagaacatacctcaatcttgggctttaggagagtttcacaactccatccctggatctcaacttaccttttaccttagaaggaatatcttgacaggccctagaccactggacccctagaaattttactgaggtagaaggtccctaaattttagtcagttttattttccatcctctagaatgtaaatgtctcataaataagtccagtgtgtttgctatttcttgctcattggattcaatcagcataatgtcatcaatgtaatggaccactgtaatatttgcaaaagcaaaaagtgacagaggtctctttgaataagattatgacacaaagccagagagttgatatatccttgaggtagaacagtaaaggtatattgccgactttgccagctgaaagcaaattgcttctggtgggccttatggacagcaatggagaaaagggcaattgctaagtcaatgtctgcataccaggtacaaagagatgcgttaatttgctcaagcaacgaaaccatatctggtacagcagctgcaactggagtcatcacttggttaagcttacaataatccactgtcattctccaaaatccatctgtcttctgtacaggccaaacgaaagagttgaatgaggatgtggtaggaatcaccgcctctgcatcctttaagtccgtgatggtggcactaatctctgcactccctccatggatacaatattggttttgatttactattttcataggtagaggcagatctaatggcttccatttggcttttcccaccataatagccctcaccctactagtcagcaagccaatttgggaattctgccatctgctaagtatgtctatgccaattatgcattcgggcactggggaaatgaccacaaaatgagtcttgggactcactggaccaactctaagttggacctgtgctaaatctctattaagtacctgacctctataagcccctattttaactggaggaccacagtgatgttttgggtccccaggaatcaatgtcagctcagagccagtgtttagtagtccccaaaatatccaatcatttcccttttcccagtgcactgttacccccataaaaggccagagatctacttggggaaagatgggagaaagattcactggataaattgttggtagtgtagtggggttgctcttcaagagaatccagcctcccctttattcaaggggttctgggtctgtaaactggctcaagtctggaaattgattgaggggccatgattctctgtttttatatttcaaattagtcttctgcccattcaacctagaatttttctgcttgtataaattaagtaggaatgcagtaggtttcctatcaattttacttctaggaacatcgtgatgaatcagccaatgccagaactctacacaagtcagactgttctgattgccattttgcctctgctgtccattacagtagctatgcccaccttgcctttgatggtcgagtgccaccacttggcccctgccacctcgggatccaattattcccattgtatttacattttttagctgagtgactgcggttcccattgttggacctgacatgcaaagaagagcaattacagggctcttcaaagattcaggtgctgccctcacaaatctattttgcaaggcaatggtcaagggtatatattttggaccttccctgctggaattagtaggtctaaagtgactaatccactccagtatcgcaatctccctaagccttttgatctctccctctacattaaaccaagggacatcaggcatttccagctcactcacagtgggctatcatttttttttttttttttttttgagacagagttttgctcttgttgcccaggctggagtgcaatggcacaatctcggctcactgcaacctccacctcctaggttcaagcgattctcctgcctcagcctcccgagtagctgggattacaggcatgcaccaccacacccggctaattttgtatttttagtagagacagggtttctccatgttggtcaggctggtctcgaactcctgacctcaagtgatccacctgcctcagcctcccaaagtgctgggattacaggcatgagccaccacacccggccagtgggccatcttttaatccatatttcagctaaccaagcaaagaaactattagaaacttgtttaactccccaacctgcaacattaaatgcagtgttcctatttagtggggcctaataaataaattctgcctgattcaaccctatgttccttccaccattatcccacacccttaacattcatctccaagcctgttctccaaatttctatttatataaattagaaaactcaagcagttctttttgagtgcagtacaccttctcatggggaacactctcaacctcacctctgaaggtccactgggactttagtctacttatatgccaagaagcaaacatgggtgttgaggttggctcctgagaagaatcaacattattttgcctgggaactgcctcagggaaggccatcactgttgcctcaggcagtgcagggtttatttcaaaggtggaaaggcagcagggatcagaaaggggatgttaccactactggggatggggaagctctttcttctaacagaaaaggttcatcggagtttgcaaactcagtcaccccggcttcatcagggtccttccacacatccccattccaagtggcagggtcccattcttttccaataaatgccctcactttaatagtagacacctggcgaggttgcccatacaccttttgttgcagatcagccactagcacaataacagtttgtgtctgtttttccacaatttcagctctttctctacaggagatgagactctcactcagggtgatcttagcagatttgaggctcagtatctgcttctaaagccaaaagatagaatccctgagttcatcattttatatcatctctctgtccactgaacttaggacaaccagcttcattatgttcctttgttctccacatatggtcaaaggttgtttttgttttgttttgttttgagatagactctcactctgtcaccaaggctggagggcagtggtgcgatctcagttcactgcaaactccgcctcccgggttcaagcaattctctgcctcagcctccggagtagctgggattacaggtgcctgccaccacacccagctaatttttgtatttttagtagagatggggtttcaccatcttggccaggctggtcttgaactcctgaccttttgatccacctgcctcggcctcccaaagtgctgggattataggtgtgagccactgcgcccggctggtcaaaggtattatgtatagagtcactaaactccttgcctcccatgagtgatagtgtcatatgcatttattttacataacttcttaaactgttcatcccaagggctatcagtgttctccatactattagaagtagagtctttagcatttttgggtctaatcatattaagcagccaactccagaaaccccagaatcaaaaaagaactctatacttaatattcttttcctctagaatcactcctggtaccaaaatctgtattagtcagggttctctagagggacataagtattaactcacacaatcacaagatcccacaatagactgtctgcaggctgagaatgaaggagagccactccgagtcccaaaaatgaagaacttggaatctggtgttcaagggcaggaagcatccagcacaggagaaagatgtaggctgggagactaggccaatctctcttttcacatttttctgcctgcttatattctaaccatgctggcagctgattagattgtgcccatccagattaagggtgggtctgccttttccagcccactgactcaattgttaatctcctttggcaacaccctcacagacacacccaagattgatacgtcgtatccttcaatccaatcaaattgacactcagtattaactatcacacctagttaaaagagtcaaccaacatccctccatttggctgaatccaggtgaaacagtcatcaccatttttctaagctgaatccagaaatgagtcagcattccacctatgggcagactcacatatcacagtcacaattccaatggtgaatttttttgatgtgtgagatttagaaccttaccagtgggctctgtttatatgtgaaggtgacaatactgttagctttgtttgtgtattaaagggtcaatctcacctgtgtgctgggcctgtgataaaactttgtactgccagagggcttcatgtaatttccattaactgtaataatcttctgtgagtctcatacaggtaggagaccaaggaccataccagtttcctcaagcctagctataatagtcaacatatcttttattggctggatccaggtatgagagttatcaatgtgcctgtgagctaactttataaataggtcaacatcacacctgtggctggatctacatatgacattccaactgcggactgtgtccatgtacaagattcaagacctaaccagaggtctctgtccatgtgtgagggtgacactcataacttttggcaggatgagcatacgagatacttcacctgtgtgctgggtgcagttatatgtcaaaatcccacctgtggaaaagaaacaagctaagagagtcacatattttaaattctaggctaaagatatgttaaaatatgccttgcaggcggggctcaggaaagagagttacatcacctgagtgctgtgacgggtgatatgtcacaatgccttctatgggcatggctcaggcaggagttttacattatttttgtgttggccctatgatatgtaacaatccccctccatttgcatgacctagagaaaatagaagagtcacagcacctaaattatgaccatagagatctatcatgatacctcctatgggcagagcctaagatagagggtcacatcacctgcaaactgggctcagtacaatgtttcaatctcccctgaggccagagcccaggcagaagaggagagttatatcacctaagtgcttgggcctgtggtatgtcacagttcatttttggggggtggcagaatgcaggcaaaggaggagtgttacatcacctaggtaatgggttcagaagtatttcacaatacctactgtgggcagggcccaggcagtacagtcacatcatggagatgctgggctcagtgatatctcacaaagactttgtggacagggcccaggctgaaaataagagtcacatgacctaagtgctgggcccagtgaaatttcacaataccctctgtaggtagggcttaagcaagagagtcacatcacaatcttttctgagagctgggcccaggcagggaagtaaaatcactcaggtgctaggcaaaagtatatgtcacaatcatacctgtgggaagatctagggctaggattcacaattccacacatgtcccagcttcaggtaaaaagcgtcaacacctcctgtgagttgcatccaagtacatgagtcacagtatcaatgatgaactggatccatgcatgagagtcccaattccacctgcagactgtgtattatgttggctttatgatatgtcaaaatccgcctccatttgcatgacctagagaaaatagaagagtcacagagccttctgtgactggtatcagagtcaaagccttctaggtgtgttgaatcctggtcttagagtcaccatccacctgtagacaaaatccagtaaaacaattacaatcccaactttcgactgcatccgagtgtgagattcagaagctcaacagttttctgtatccatgcaggagggtgacaatttttactaggcgctagaagtgcatatgagaattaaaatctcagcttgttctgggtcctcttatgacactctctgtaccaccccgagggctttacattgtttgggtgagagtcatcatctgctgtgagacattagtgctggtataaattcatgatcttgcctattgccctaagcttaggtatgaaagtcaacatctctcctattgtctgggtccaggtatgaaagtcattgctgtgcctcttagttgggttttatgagtcaccctcccacctgtggttggatccacacatgacattaaaaattccaactgtggactgcatctgtaagtgagtttcaggacttcacaagtgggttctgtccatatatgtgggggacaattcttactgtttgctgggtgtgcatttgagagtcacaatctcaaattttgctgagttatgtaatgacactttttgtacaacctgagggcattatacaatattagtgagtgtagtaatcctctgtgacatttatacaagtagaaaacccaaaaccttacctgttgccctaagcctaagtacaagcatcaacatatcttctattggctgggtttattgtgcaagtgaattgggttcagaaatttgccaccatccaaccggcggaataggttcatgtgtgaggttcaggacctcaccagtaagctcagtctacatgtgagggtggcaattcaaactgttggttaggtgtgtataggagagtcacaatctcacctgtgtgctcagtcttgtaatgacactctgtattgcccaaaagctttatacaatatgtgtgagtgtcataatcttctgttaccttcctacaagtaaaagacctagacccctaagcctagctaccagagtcaacatctctcttattggctgggcccatgtttgacagtcatcaccatttctgtgagctgaatccagaaatgaatcaccatcccacttatggcaagatatacatatgacagtcacaattccagctgttgactgcattcactcatgagactcaggacctcaacagcagtctttgtccatgtgttatagtgacaatagtaactgttgtatgggattgcatacaagaataaaaatctcatctgtgtcctggaccacatcatatttcacaatcttatctgtgggaaaggttaaaaaatgagagtaacatcacctgaattcttcacctggaatatgtctcaatctcctctatgggcaaggcccagactggagaattggatcacttgcatgcagggtccggtgacatattataatattttctctaggcacagctcaggcaggagagtcacaacatttgggtgctgggctcagagatatgccacaatcccttttttgggcatgtctcctgcaacagagaagaggcacattatgtagaaaattggtacagggatttgtcacaatgtccccttttggtggtgcacaggcaggtgaggagagtcacatcacccagataatgggcctagcaatatatcacaatgccccctgatggaagggcaaagacaagaaagtcacataacctaggtgagaaaacctgacataggtcacaatgcatgttatgagtagggatcatggaaaagaggagagtcatataacctggaggctgcactcagataaatgtcataatcatcccagtgggcagggcctaggcatgagaggagagtcacatcacataaatgctaggcctagcgatatgtcatagtccccactgtgtacaggtcccagaataaagtaaagagtcacaccatctacatgttgggaccaaagatatgtagcaattacacctgtgggcaggggtcaggcagaagagccacagcacctgtgtgctggaccctgtgataagttttttttttatttatctgttggcatggcccagtcagaagaggcaaatcaaaccacctgggttctgggcccagtgatatgtcacaatgtcttccataggcaaagcccaggtaacagaggagactcacatcaaataattgatggacccagagatatttcacaatgcccgctgtgagcaagagccaggcaagagactcacatcacttttgtgctgggccactatcttttgtgtgagcagaacataggaaaaagagaagcattggccgggcgcggtggctcatgcctgtaatctcagcactttgcggggctgaggagggtggatcacctgagatcaggagtttgagaccagcctgaccaacaaggtgaagccccgtctctactaaaaatacaaaatacaccaagtgtgatggcaggtgcctgtagtcccagctgctcaggaggctgagacagaagaatttcttgaacccaggaggcagatattgcagtgagccgagatcgtgccactgcactccagcctgggtgatggagcaagactccatctcaaaaaaaaaaaaaaaaaaaaaaaaaaaaaaaaaaaaaagagagagaagcatcacatcagcagagtgctgagcccagatatgtcccaatccccctgtgagcagaatgcatgcagaagagagtcaacatacatggatgatgggcacagagatatttcataatgtccactgcaggaagggcacaggaagaagtgtaacatcacttgagtgttggacagtgcaatatgtcaaaatagccaatgtggtcagggcacaggcagaaatcacataacctgggtgcagggcctgacagtgcatcacagtgtcctctatgggcggagccaaggcaggagaataggtcacatcagctaagtgcttggccaagtgatacgtcataatccctactgggggctggaccgaggctgggaagtcaaatcgctcagattctgggcagaagcatacatcagaattacaccagcaggaaggtcctgaaatgaaattaacaatcccacacatgtcccagtttcaggtatgagagtcaacaccttctgtaggtttggtttaagtacctgagtcacagtttcaacaatggactgaatttgtacacaaaagacccaatcccttctgaagactgtgtccccttattgaagccacagcctcacagccatgaggaatcttggtctgagagtaaccaacccacctatggatcagatccacatataagagttaattattcaacttcccattgcctctggttgggagattcagagcctcaacagtgggctgtgctcatgtgaaaggatgacaatatttgctattggctacctgtgcataagagtgtcacaatattacctgtgtgctgggtgctgtaaggacactttctctaccattcaagggctgtatatgctatgcatgagagttagaatttgctctgagacctccatgctagtatgaacccatgattgtcacccgtggccctaagctcatgtatgagactcaacatctctttaattgacttggtccagataggagattcctcaactgcctatgagatggctttagaaatgagtcgccatctcaattgtggttggatgtttacatatgacagtcacaattccaactgtaaactgcatccgtgtatgaagttcaagacctcaccagtaaactgtgtccttgcatgaatgcaataatcctaataattggtggggtgtacacacaatataaacaatctcacctgtgtgttgggcactgtgaagacactctctgtatcacctgagggctttatacagtatgtgagggagtggaaattctctatgacctttctacaaaaaggagactcaggatcttacccatttctctaagcttagctacaagagacagtatctcttctggtgactgttatgagagttattattgcacctgtcagccaggccaagatgtatgttacaatcccatttgtcagtagagagtgagcaggatggtcacatcacatgagtgctgggaaagggttatgtcacagtcatttttgaggccagggaccagggataaaagaaatatcaccttagtgctaggccaagggttatgttccactgttttctgtgggcaaggtgcaggcaaaacaaactcatcaccttgttactgggcccagtgatatgtcacaattttcactgagggcaaagtggaggctaaaaacaagggtcatatctcttaggtcatgatgcagagatacatcacaaggcctcccgtgggcaggccacaggtagaaatcaccaatttcctaggtgttggagcctgtgatatgtcaaaacacacaatgtatgcagggcccatgcaggagagaagagtcacataacttaggtactgagcctagcaatacatcccaatttcttcttggacagagcccaagagatagaagagtcttattacccaggtgttgggtctagctatatgtcaaaatattctctgaagggagagatcagggaggagtgtaacctcacctaggtcagaagcccagagatgttgccgattctgtgtaagtctcaggaaaaagagaagagtcaggtatcctagaaactaggctacattatatgttgcaattatccaagtgggagggttctcatgagaagagagtcacaacatgtagctgctgagctaaacgatgcatcacaattcccactgcgtactggtcccagaaagaagaggagagtcccatcatctaggtgatgggtccagaaatatggcatacgcatcctgtgggcaagcaacaggcagaggtatctcagcatgtctgtagtaggcccggtattaagttactctcccttgtatgggcatgatccaggcagaagaagtcacatcacctaggtgctgggcccagagatatatcacaatatcttttgtgggaaaagacaaggtaaaagaagagacatcaaatagttgatgggtctagagatatgttacaatctttctgtgggcagggtctaggcaggagactcagtcactgtggtcctgggcacagcactatgtaaaaatgctttattttggaagagccaaggcagaagaatatcacctgtctgttagcccagcgacttgtcacaatatcccctgcaaactgaaccttgaaagaagattagagtaatgtcagctaggtgctggccccaattatttgtcaaaatccttcttttgaaaagaaattggtagaagaggattatcaaaacacaaagttgattggtgcatagatatgtcacaaaaatccttgtaggcagggccaggcaggagagttacatcacctgggtattggacccagcaacatgtcaaaattgcccatatgggcagggcacaggcaggggactcacataacctgaatgtggtgccaagtgatatgtgacagtgccccctgtgggcagcatgaaggcagaagagactcacatcacctggatgcaaggccaagcaatatgtcacaatgttcccttttggcaacgctaaggcaggagtatgcagctgcatcacctaattgttggttttgatgaaattttataatttcagctgtgggctgggcccagggagtagagttaaatcactcaggtgatgggcagaatctatgtcacaatcatatctgcaggaatatccaggtatgtgattaacaatcccatatatgtctaggttctaggtgtaagattcaatagccggccaggcatggtggctcacgcctgtaatcccagcactttgggaggccaaggcagacagatcacctgaggtcaagattttgacctcagatggccaacgaggtgaaactccgtctctactaaaaatacaaaaattagccaggtgtggtgccaggtgtctgtaatcccagctactctactcaggaggctgaggcaggagaattgcttgaatccaggaggtggaggttgcagtgagccaagatctgccactgcactccagcctggggaaaaagagtcaggctccatctaaagaaaaaaaaaaaaaaaaaaaaaaaattcagcagctcatgtatgttggacctaagtaaaggagtcacaatctaagtggtagaataatctgtccatgagacccttaatccctcctgtgacctgcttctccttagtgaagtcacagcctcagacttgtgttgaatctgagactcaccatcccacctgtgaatgggatccaggtatgatagtcaattttctaacttttgactgccttcgagtctgagattcagaagctcaatcactggctgtttcatgagacagaatgacaatctttactgttgactgggtgtgcatatgagtggcacagtctcacctgtgtgctgggctctgttggaacacattctgcaccgcctgagggctttatgcagtgtgcctaaaagtcacagtctgctctgagacctttctgcttttatagacccatggtcatacctgtgaccctaagttcaggtgtgagcatagttggcagggttcaaattagagagtcctcactctctagtcagcagggtctagactggagagtcgtcacccacctgcgcactggatttattaatgagtcaccaccttaattgttgccggatgttaatatatgacagtaacaattccaactttgaaccatatccacctgtaagattcaggacctcaacagttggctgttgccatgtgtgagggtgacaatcataacagttggcagtttgtgcattgtagaaacaatctcacctgtgtgctaagccctgtgaagacactctttgtggcacccaaaagtttatagaacacactaaagattggtaattcattatgacattcatacaaagagaaggcccagggtcttgtttcctaatctacactacaagagacactatctcccctattggctgattccaggtatcatcatagcacctatgagttgggccaggatatttgtcacaatctcacctgtaagtagaaaatgagcagaagagtcacatcacctggatgctgtatgaggaatgtcacaatattttctggaagcagggcacaggcagaagagtcacataacctggtggctgagcccagtgatgtttcacaatgctccctgtgggaaaagacctgccagaaaagacacatcacctggttactgggcagagctatatgtcacaatcttctctatgtgcaggctgcaggcagaaaaagagtcacatcacttaggcgatagatgcagacatatgtcacaaggccgcctatgggcagggcttattcagtagcctctgatccaatcctgtaggtgttgggtccagcgacatgtcacaataccaaaaatatgcatggctcagcaaaagaaaagatttacatcatctaggtactggatccagtgatatgtcacaatcttcttttttggcatagctcaggaagaagtagagagtcacatcaccaaggtgttggatcaagccatatgtcacaatacacaataaatgcagggctcatgaaaagatgagagtcaaatctcttaggtgtggaacagtggtacatcacaatttctcctttgtcagagccacatcacctaggtggctggcccagtaatatgtcacaattcccttgagaggtgagcccaggcaggagagtcacatcatttcggtgagaaccccacagatgtgtcattattttccctgtgaatagggctcaggaagaaaatgacagtcacatcatttaaatgatgggcccagagatagattacaatggctcctgggtacaaaaaccaggcagaagaattacatcacctgtgtgctgggcccagtgataagtcactttcccttgtgtgggcatggcttcagcaggagagaagcgtcacatcactaaggttctggttccagagatatgtcacaatctctcctattgacaaagcatgggtaggagaggagagtcaaatgaagcagttgatgggcccagagatatgtcacaatgccccccccccccccgcccgtaggcagagtacaagcaggtacctcccaattctttagatgttgtggccagggacatgtcacaatacttaaaaaatgcaggacacaggcaataaaacaaagtcacatcacctaggtgctaggttcagcgatatatcacaatccctaattcaagaggggagataaaaagattcacgtaaccaaggtgttaaatgtaaagatatgtcataatattcctgtgggcagagaccattcaggagagtcacattaccttaatgttggacccagccatatatcacaatacacagcatatccagagttcaagcagggaagaaaaatcacatcatctagttgctgggtttgataatatgtcacaatcacttgtttttgtagaacccagacagaaaagaagagtcacatctcctggttgatggatgcagagataagccaaaagactccttgtggccaggacccaggcgggaggttctcatgccctaggtgtttgtctcagccatacgtcatattaccaaatatatgcagggcccaggcaaacaaggagagtcataacaccttggtgctaagtttagtgatatgttacgatccccacttttggcagggccgggacacacacacacacaaagtcacatcacctaggcagtataaaaaaagatatgtcataatacccctgtagacagggtccattcagaagagtctcatcacctagcttttagactcagttatttgtcacaatacacaatttatgcaagactcagtcaaaagaggaaagtcatgtaacctaggtgctgggtccagtgatacattacaatctctccttgggtaaagtccaagcactagaaaagagttacattacctaggtacttggtccaggaatatgtcacaatacctcctgaggaaagagcccaggaaggggagtcacatcacctaatcgtggggtccaaagatatttcccagtgcttcttgtaggtagagctgaggataagcaaaagagtcacataacctaggggctgggcccagctatatgtcacaactaccccaggtggcaagtctctggtatgaaaggagaatcacatcacatagatactgggccaagcaatatgtcacaatctccactgtaggaaggtcccaggaaaagagaagagtcacattatctgggtgacgggcacaggaacatatcataattaccctaagcatatgtgttactgtcatgcgcaaccgcgtgaagagaccaccaaacaggctttgtgtaagcaataaagctttttaatcacctgggtgcaagcgggctgagtccgaaaaaagagtcagcgaagggagataggggtggggccgttttaaaggatttgggcgggtagtggaaaattacagtcaaagggggtttttctcttgcaggcaggggtgggggtcacaaggtgctcagtgagggaggttctgagccaggagaaggaatttcacaacattaatggctcagttaaggtggggcaggaacaaatcacaatggtggaatgtcatcagttaaggcaggaaccagcaattttcacttcttttgtgattcttcacttgcttcaggccatccgcatgtattcctgcaggtcacaggggatatcatggcttagcttgggctcagaggcctgacagttaggtcacctgtgtgtgaggcccagtgataagccactcttccttttgtgcacagggtctaagcaaaagatgaaaagtcacatcacctaggtgctgggcttacagaattgtctcaatctctcctatggtcaaagccaatttaagagacataaatcatattagctgctctgcctatggagcagccatctttttgtttctttacttctctaataaacttggtttcactttactgcatggactcaccttggcttctttctttcttgcatgagatccaagaaccctttcttggggtgtgaatcaaaagccctttccagaacagctttttggcaaactataaagggactatactgatgagaaacctgacccaaaggaaataactacagcaccaattagcctgctttgggtaactagtggggtacatttttttcacacacgtccatgtgaagagaccaccaaacaggctttgtgtgagcaataaagctttttaatcacctggatgcaggtgggctgagtctgaaaagaaagtcagtgaagggagataggggtagggccattttataggattcgggtaggtaatggaaaattacagtcaaagggggttgttctctggttggcaggggttgggggtcacaaggtgctcagtgggggagcttttgagccaggatgagccaggagaaggaatttcacaaagtaatgtcatcagttaaggcaggaactggccattttcacttcttttgtgattcttcacttgcttcaggtcatctggatgaatacgtgcaggcatgggctcagagacctgacatttattaatattttcttatattaataagaaaaataaaatagtgttgaagtgttggggcagtgaaaatttttgggagtggtatggagagataatgggcgatgtttctcagggctgctttgagcgggattaggggcagcgtgggaacctagagtgggagagattaagctgaaggaagattttgtggtaaggggtgacattgtggggttgttagaaggagcatttgtcatatcgaatgattggtgatggcctggatgcagttttgtatgaattgaaaaactaaacagaagacacaaggtctgaataagagaaggagaaaaataggtattaaaggactaagaattgggaggacccaggacatccaattagagagtgtccaagggggttcagcataattacttgctttgctggcaagtttttgagctctatccttgacagagtcctcctttttaagttggaggttgagtttgctgaggtgtgtttttaaaaaaccattagtctgttctacctttcctgatgattgaggacggtaaggggtatgaagtttccactgaataccaagagcctgaaaaactgcttgggtgatttgactaataaaggccagtccgttattggactgtatagaggtgggaaggccaaaccaaggaattatgtcttacagaagggaagaaatgaccatggtggccttttcagaccctgtgggaaaggcctctacctaaccagtgaaagtgtctacccagaccaagaggtattttagtttcctgactcgagacacgtaagtaaagtcaatttgccagtcctgggcaggggtaaatccctgagcctgatgtgtatggaagggaggggacctgaaaaatccctgaggagtactagaatagcagatggaacactgagaggtgatttccttgaggacagatttccacaatggaaaggaaatgagaggttctaagaggtgggctagtggcttgtaacctacatggaagaggttatgaaatgttgatggaatagaataggcctgtgaggctggaaggacatggacatattttccttggtctaagaaccatttgccttgtgtgggaagagattcataggtggaagtttcagtgggggagtaggtgggagtgaccgatgagaaggagaaaaactggccatgagggacagaagttggaatgctagctgcttctttagctacctcagcagcataagcgttgtcctgagctatgagatctgacgtcttctgatggcccttgcagtgaatgactccagcttcctttggaagtaaagcggccttgagaagagtttttattaaagaggcattaaagatggaggacccttgcatagcgaggaaacctttttcagcccatataacaacatggtggtgcaggatatggaaggtatatttagagtcagtatgaatattgacacatcatcaatatttgtgagagtgagggttcaagttaaggcaatgagttcgacttgctgagagctggtggagggggcagagtggtagcctcaatgatagatgtggaagatactatagcatagcctgcctttgctgatgagcggcgagtaggcctggtggaactgccattgataaaccaagtgtgattagagtgaggaacaagaaagaaggaaatatggggaaatggagtgaatgtcaggtggatcagggagatatagtcatgggggtcaggtgtggtatccggaataatgtgggagcctggattgaagtctgggccaggaacaatggtaattgtgggaggctcaacaaagagtgagtatagctgaaggagctggggagcagaaagtatatgtgttagctgtgaggaagaaaatagattttggaagttatgagaactgtagagagtgagttgagcatagtttgtgattttgagggcctctaaaatattaaagcagcggcagccacagcacacagacatgagggctaggctaaaacagtaaggtcaagttgtttggacagaaaggctacagggcgcagtcccagctcttctgtaagaactctgaccacacagccctgcacttcagctgtgtgtaatgaaaagggagtgatgagttagggagagctagtgtgggagctgtttttcaaggaatggaaaggggagtggggaaaggatttaggatctatggggtaagctaggtttgcttttctgagtttatataatcgtttagtcaggatggtaaaactaggtatccaaaggcagaagtacctaaccatgcctaagaaggaaaggagttgttgttttatagaaagggttggggttcagaagattagccagacatgattagcagggagagcttgtgtgttttcatgaagaattatgccgagataggtaacagatggggaataaatttgggcttgacttaagtaatgggggctgtccgtgaagccttgtggcagtacagcccaggtaatttgctgagcccaatgggtgtcagggtcagtccaaatgaaagcgaagagaggctgggatgaagggtgcaaaggaatagtaaagaaagcatgtttgagatccagaacagaataacgggttgtggaggggttgtggagggaggtattgaggataggagagtatatgggtttggctccacggagtggataggcaaaacaatttggttgataaggtgcagatcctgaactaacttgtaagacttgcccagtttttggacaggtaaaatgggggaattgtaagaagagtttataggctttaaaagaccatgctgtaacaggtgagtgataacaggctttaatccttttaaagagtgctgtgggatgggatattggcattcagtggcataagggtggttaggttttaacaggatggtaaggggtgcatgttcggttgccaaggaaggagtagaggtgtcctatacttgtggattaaggtggggagaaacaaggggaggaggcaaaggaggctttgaactgggaaaaagggtagcaatgaggtgtggctgtagcctaggaatagtcagggaagcaaataatttagttaaaatgcctagacctgataagggaactgggcaggtggggataactaaaaaggagtgcataaaagaatattgtccaagttggcaccagagttggggagttttaagaggtttagaagcctggccatcaatacccacaacagttatggagacaagggaaacaggcccttgaaaagaaggtaatatggaatgggcagcctctgtgttgattaagaaggggaaggacttaccctccactgtaagagttactcaaagtgtctatgatggtccaggaggcttccgaggtgatcagagcagcatcagtcttcagctgctaagccgagaagatatgggaaagagtcagtcagagccttgggccaattggacagtccaatttccagtggggtcccacacagatgggacatggcttaggaggaatcctgggctgtgggcattccttggcccagtggccagatttccagcacttgaagtaagatcctgggggaggaggtcctgaaggaacacctgactgctgtggcttaggcgttttgaagttcttgtgtgctggagatgtggctggggtttctctcacagcagaggaaagtaattgcaactcttctctattattgtacaccttgaaggtgaggttaattaagtcctgttgtggggtttgagggccagaatataatttttggagttttatttaatgttgggagcagattgggtaataaaatgcatattgagaataagatggccttctgacacttcagggtctagggctgtaaagtgtctaagggttgttgccaaacaggccatgaactgcgctgtgtttttatatttgatgataaagagcctaaacgctaactgatttgggagaggtcagataaagaaaaaggagcattaaccttgactatgcctttagctccagccacctttttaagaggaaattgctgggcaggtgggggagagctagtcacgaaacaaaactgtaagccagaccaggtgtgagcaggggaggtgataaaggattatagggttggggaagagaggctgaggaagaatcaggacctgactcggcctggcaaggagcagtctggggaggagaggtcagatgggtctgtagaaaaggattcaaaagactcagtgacacttggggttgggactgaagggacaggtgggagggaaagaaggaggatttgggatgagttgcattgggaacggagactagggagggaccgatgtgtaaaagaatgcctggacatcaggcacctcagatcatttgcccatttttcaacaaaaatcatccaggtcttgtaaaatggagaaatcaaaagtaccattttctggctatttagaaccattatcgagtttgtattggggccaaacagtgttgcagaagaaaataaaatgcttaggttttaggtcaggtgagaattgaagaggttttaagtttttgagaacataggataagggagaagaagggggaatggagggtggaaggttgcccatagtgaaggaggcaagcccagagaaaagagagggtagagacacagagaaggggtgggtagtgagcagccctgggctgcaatgtgggtgagcagccaaagcaggcatccccacaattgacttgccactaaggaaatgtgggtgaatgaccaaggcaggcatcccagtggtgatcagacacaaatggagtgtgggtgaataattaggcaggcatcccagcagtgattaaacaccaagggaagactgtcttcccgagtctgtgactggcgctggagttttgggtccacggataaaagtgtctcctttgtctctactagcgaggaaaaagaactggaattggaaggacagggagattgaagggtagcaagagaggctggagaagagagtgaaaagacagcttacccaatttgaaattggtgagatgttgcttgggctggttggtctgaggacccgaggttgtaggtggatctccttatggagtgagggcgaggacaggggaccggtctcccaaaggagtcctcctatcctgggtcttcggcaccaaatgtcacgtgcatctgtgtaaagagaccaccaaacagtctttgtgtgagcaacaaggctatttatttcacctgggaacaggctggctgagtccaaaaagagagtccgcgaagggagataggggtggggctgttttataggatttgggtaggtagtggaaaattacagtcaaagggggttgttctctggcggtcaggggtgggggtcacaaggttctcaatgggggaggttctgagccaggagaaggaatttcacaaggtaatgtcatcagttaaggcaggaacaggccattttcacttcttttgtgattcttcacttgcttcaggccatctggatatatacatgcaggtcacaggggatatgatggcttagcttgggctcagaggtgtgacaaaaatcaagaaaaatacttcagtccgctgagaaaaattctttttccaacaaaacaacatccaagaaagaaaaacattaaggccttttttttttttttttttttttttgagacagagtctcactgtgtcacccaggctggagtgcagtggcacaatcttggctcactgcaacctctgcctcctggattcaagcagttctcctatctcagcctcctgagtagctgggactacaggtgcatgccaccacacccggctaatttttttgtatttttagtagagatggggtttcaccatattggtcaggctggtctcaaactcctgacctcaggtgatacatccgcaaggccttttaaatatacttataacttggatgtccacttttaattaagctgatcgctctttaagaaaattcttttaactcccttattacttaactttagccatgccaagcagccattatttctggcttccaaattttattagaagttcagagaaaggagaatcgaaggcagttcataaaggaaaaaagaattagcaaaaagcaaaagtcacacagacatcaaaccagaaagaactcattttctaagccaggattaaaccccagacaaccattgtaaaatcgcaaaggctagaacaaaacattatcatcgtcaggcctctgagcccaagctaagccatcatatcccctgtgacctgcacgtatacatccagatggcctgaagcaagtgaagaatcataaaagaaatgaaaatggacagttcctgccttaactgatgacattaccttgtgaaattccttctcctggctcagaagctcccccactgagcaccttgtgaccaccgcccctgcccgccagagaacaaccccctttgactgtaactttccactacctacccaaatcctataaagaggccccacacctatgtcccttcactgactctcttttcggactcagcccacctgcacccaggtgattaaagcgctttattgctcacacaaagcctgtttggtggtctcttcacacagacgtgcgtgacaaccatgtggtggttgtgacttaaaaccggatggaggcctgcagcaaagtttgctacagaccatacagcacacaaagcacaccagattggctacttaagatcaagctcacaaatttttcctacaataaaaactctacagaagatataaacagtgatgttcatcattcctggatcaacagaatgtcctccaaagagaaaaaaaagaaaacacgcttaaaagtcaactgctggctatgtgcgtggctcatgcctgtaatcccagcactttgggaggccaaggtgggtggctcacctgaggtcaggagtttgagaccagcctggccaacatggcaaaaccctgtctgtctgtactaaaaatacaaaaattagccaggcgtggtgatgcacgcctgtatcccagctactcatggaggctgaggcaggagaatcacttgaactcgggaagcagaggttgcagtgagccaagatcacaccactgcactccagcctaggtaacataagtgaaactctatctcaaaaaaaaaaaaaagaaaagtcaaccctgacaaggtagaaaaaaaagaaaagatgcctggggaagaacgtcttattcttatgcaaatgggcttctctaccagagagagaaacttcattgctccctaataaagtgggatcttttggctgggggagggcaagcctctatggatgcatggcagggagtgctggccagcctggcatcgggcaccctgtaaccatggactccagccctagttgggagtggtgtggggaagctgccattccctggtccatcctccacatacctgcagccattggggtggggtggggtgcactctcaaaggaggtctgaagagaaaaaggcttagaaataaaaggaaagaaggtttttgagtttgtatggtactcacccttcctcaagccccatgtctggaaaccaaaaatgttataggaaaaaaaccagtttcttgtaaaattaccaggaaatattaggttcacagacacatagaggggcgaggagcagaatttattaggcaaaaaggaagaagaaaacaactcaataaaatgagatggggtcctgctaacaagctctccacctcaccgattgaattccaggtccccatacaggaacaggagaggccaggaaactcctcctgcagacggtgtgaacttcctgaggctctgccccatcctcccagtgcataggccggtttgagattctctgaggactcatttttacttggctgtctcaatacataggcattagccttggcaactgacttctagaaatctgctatgcaattagagctttacaaacattaagcaaatattttatcatttaatctctgtggttttcttttcttttttttttcctttttcttgagagagactatctctgtcactcagggtggagcgcagtggcgtgatcacagctcattgcagcctcaacaatctaggctcaagcacttttgctacttcagcctctgagcagcagagaccccaggcatgtgccaccatgctcagctaatctcccatttttctttttgtagagataagctctccctatgtagcataggctggtctcgcatgtcattcacatagcccgtgaaaaagctggccctcctactttagccttttaatatgcaaaggcagggcgccatggatgttctacacacgtggagatatgtgggggtggccatgttgccaggaacatttggtgcaagggcaagaaggccacgagggaatcaccaaattgggtggaccaagtttctaagggcctgcatttgtatatcaaaagttgccagcctggctctaagagctggggctttaaaagaaacttttccagagatactttaaaaaatgaaaacttcccaaggacctattttcctctaatccacgtaaaataatttcttaataactcctaccacacagggctaggattacaggcatgagccactacatgcagacagaggttttatttttatatcaaaatataaaaatagcattagccaggcacggtggctcacgcctgtaatcccagcactttgggagcccaaggcaggcagttcatgaggtcaggagttcctagaccagcctgaccaatatggtgaaatcccgtctctactaaaaatacaaaattagtcaggcatggtggcacacacctgtaatctcagctactcaggagggtgaggcaggagaattgcttgaacctgggaggcagaaatggcagtaagccaaaattgtgccactgcactccagcctgggggacagagcaagacaccatctcaaaaaaaaaaggaaaaaaaaaaaaagaaaaaattagctgggtgtggtggcacatgcctgtaatcctagctactctggaggctgaggcagaagaatcacttgaacctggaaggcggaggtttcagtgagccaagattgcaccattgtactccagtctgggtaacaagagctaaactccatctcaaaaaaacaaaacacaacaaaaaaaaagaaagcaaattcaaataaataaaaataacaaaatatcatatagtatagataatatgaccagaaagaaaaaaaaaagcttagctttcctgactttaagctgcattagtactatagtactaatagaatatccttagtgaagactattctatttccataaaaaattcaacataagataattttcaggttttagaaattgatgaataacataatatagaaaggcagcaatgtgttcccatgatgtagtattgttgtgggacaatcagagatgggagagaccgaacagagttcaggaaagcctttattaaggtgatcacctggctcagtaggactagagtccaggaaagtgagccccagacaaagaaagcagccaccttttaagcagtcagcagccgggagctacgtgatgcaggaagcatacttacagaagtgagaacagaggcagttgatcagtcttttacatttatctatactatgtgttccacatccttgggaaaccatgtttctgtaacatatgcttaccaaccttgtaactgcagctgcgctagggaggtgaagcagaaactcactgagcctcaaggaatgtgaaactggtgagtacagataaggctctctgagcacagaaggaaaaacaggcagttagtattcttctctaacttagactttgttggggggctacactacacttagcttttgaaggaaaaaataaaaatttcttggttgtctttgattacacttgtaaaattcatgattccttctttagtattacttgaaataaaaactgagcaaatacagcaaaatacattttaaagttaatctcatgtcaaaataggtacagaagttctaataaaataataaatggaatccagaaatgtattaaaaataatatgttgtatatatatgtattgtattagaatgtcaatgcaattaaagatggaaaatgtgttgtttaattacatgaaaagtttaaaaagtgaccattctctatgattctgaaaacaggaattgtctcaacagatgtgttttcgcatctacatttacctacacatattttatatgacatctatctattctttatccattcatagaatgtataaaaaaagaatggatttaaaatgaatagcatctgataaaagaagcacttaaatgtattatgaaagttactttattacatagtgtccagatacttatatgttccctcagaaattataaaataagattgtatcaactcttccaggtaatttaagaaaatattttaaaaatatgtggataaggttattagctgaaaataagagagaatacattcatttgcacagataaagagaacactttttaaatacaaaaagtatcacgaaaaatgcagataatgtacattatctaaaaaatactaaatctaaaaaacaactcagtgctataagatttatgcagcatagagaaattatatataaatatcaactgtttatatttacttttttgagagagggtctcactccattacccaggctggagtgcagtggcttgatcatggctcactgcagcgtcaactccctgggctcaggtgattctcccatcccagcctcttaattagctgacactacaggtgtatgataccacacccagctagttttatgtacttttttgtagaaatgaggtttcgccgtgtttcccaggctgaactcgaactcctgagctcaagcaacccgcctgcctaggcttcccaaagtgctgaaactacaggcattagcaaccatgccctgcctgaatatggatattttaaataacttcagtgtgaaatactaaacacagttcaaaatgtattttacttatatgcaatgagttgaacaaacattcaagagctaaatgatgagtaaatataaggcccaacaaccaggggcatgataatgcaaacagctaatgtgtggagcactcttgctttgccagcctgtgtttcaaagcattttaaatatttttgctcattaaatcctcatcagcaaaaactctgtaagtttaattattccccatgtcacagacaagtgactgaaggaaaaaaaattcagggacttgtccaaggccacccatatagggagtggttgagctaaggtgtgctctgacttactcctctctgcttctcttgaatagaaagtgctataattcattgattaaaaaaactactcttggccggacatggtggcacatgcctataatcctagcactttgggaggctgaggcaggtggatcacaaggtcaagagatcaagatcatcctggccaacatggtgaaaccctgtctctactaaaaatacaaaaattagctgggtgtggtggcacatgcctgtagtctcagctacttgggaggctgaggcagaagaattgcttgaacccgggaggtggaggttgcagtgagccaagatcgtgccactgcactccagctgcgtgatggagcaagactctgtcaaaaacaaaaacaaaaaaactactctttgagcacctgccatggaccaagcactgtgattggcactaggaacatagtggtaaactagacacagctcccaggagcaaagacataaagaagtaaacaacaaacctcaagatcatttcagagaatgtgaagtgccaggacatgctgctgctataaagaatgtgtgtgcacagggctaatgggggtgagctctagttaaaatgaggtgggtagaacaaagcttcccagggagagccagagctgagccaggcctggtggctcctatcagtgtgagaatgtggttatattctgtctcagtttttttgtatgcagcccttaaaatctttggaatgtctgatatgagaaatgtctttcgcatgctaatgagattactgctttccaggggcttctggacagcctcagaatggggattggttgccagaaaaaccaatcctgtaatacagagttaaaactttcagcttaaccccttatctcctgggatgttagaggagctatcttgcctttgtaaaagtaaaaatagtaccttataccatttaaatgaatagataaattgttcaaaaaaggggcatatcattaaaaagctcctctgccccagcctgactacttaaagtacccattaggggaagtttttttggtatccttctgaaattgctttctgtctttccatgcataccatccttaggaaagggcacacttttttgagacggagtcttgctctgtctcccaggctggagtgcagtggcccgatctcggctgactacaacctccacctcccgagttccagtgattctcccacctcagcctcccaagtagttgggattataggcacccaccaccacaccaagctaattttttgtatttttagtagagatggggtttcaccatgtcagccaggctggtcttgaactcctgacctcaagtgatctgcccatctctcccaaagtgctgggattataggcatgagccaccatgctcggcctgggcacactcttaaaccaatctgtaatctctgttcctgaggttttagtaacctgatatttctctcctgttggagacaaccctgaaaatgagttttcacctcagagaacagaccaacaaaaggtcaggtgagcttaaaaaagctggcggggggatttgggtccagaaagggcaggctggccatacattcaggggcatcagtgtgactgtctttgcaattaggagccaggccccacagagcttcccactgcatgtgtgtttgacctatgctgggccctgatgttgattcgtttccttcactgagcaggtggctcatagttgggctattatacccaggagaatgttccaggccagcccctagttaacttaaaataatcaaaaagtttagaatcaaatttgaaacaaatttattcagggtcgcatattgaggatcacctccataaggatagatttaaattgccctgaatatatattctgattagcagccattacaagcaggtatttctatgaaaatgagaaggcagttctaaagtggtttaccaaaaatttacattaaaatacataagctattgattagctatttttctttattttacaaatttcagaaaaaagaaataatgggtgagacagccagtcagaaacacaatgtaaggtcctctgaacaggctacaccatggtggagccattgcaacctctgtgacccacatgtacaggcctcctggagtcacaaagcctgtagcaacaggagaaccactaaagaagaagaaacagctagttcctgccttaactgattaaccaaccttgcaacattccaccattgtgatatgttgctgcccttccctaactaatcaatcgactttgtgatatcgtgccttgtaacctccccctacctcgtgactatgcaccttgtgacattcttcccctgcctgaaaaaactgccctaactgtaactttccactacctaccccaaacctataaaaccacttccactgacaccaccctttgctgactccctttttggactcagctcattcgcacctgagtgaataaacagccttgttgctcacagtaagcctgctaaggtggtctcttatacagatgcacataacacataacatctttttttttttttttttttttgagatggagtcttactctgtcaccaggctggagtgcaatggcactttttcagctcactgcaacctctgccttccgggttcatgccattctcctgcctcagcctcctgagtagctgggactacaggcacctgccaccacacctggctaatttttgtatttttagtagagatggggtttcaccctgttggccaggatggtctcgatctcttgacctcatgatccacccggctcggcctcccaaagtgctgggattacaggcatgaaccactgtgcccagcaacacataatagctttaaacaattgaccctgggcacaggtgtggagtgagactgaagtcctagactctcatctctctgggcttgatgaattgtgcagaacgcacaaagctgagactgccatgagctatttttcttctctcacccccttgcttaggtcacatgaactataaagaggaaacaaattcaaattagagacttgtcaacccacaaaaataatgcctgaagatgccttccaggaatctggctcctacctcctttccccaccctgccatcaaccatcaactccccttacacacacacaccctggatcacaagaaagacaaaaccatttcaccagccactgagagaggagccacagaaggacccagaacccctgcatggccaccttggacaagcctagaatatactgacagccattgttagcatccaggagctatttattcccatcttcgcactacagtaaagaattttgttttttgagacagagtctcactctgcccggactggtgttcagtggcttgatctcagttcattgcaacctctgcctccaagattcaagagattctcctccctcagccccccttgtagctgggattacaggcacctgccaccatgcctaatttttgtattttttttttttttagtagagacaggatatcgtcatgttggccaggctgatctcgaactcctgacctcaggtgatctgccaaccttggcctcccaaagtgctgggattacaggtgtgagccgctcgaaagcagcctggccaacattgcgaaaccccatctctactaaaaatacaaaaattagccaggtatggtggtgcgtgcctgtaatcccagctactaggggtttgaggcaggaggatcacttgaactcgagaggtggaggttgcagtgacccgatatcctgccattgcactccagcctgggcaacagagcgagactctgtctcaaaaacgacaaaaacaacaacaacaaaactttaaacagtcacaaggaagattgtctagactgtctagattccctagactagctggaagctggtgcttgcaacatcccgtatcccccaggagctcactgctgcagtctcaggtacacacctgcccatgtgccattcaaatgaaacaactgttatcaaggaaccagagttcctgcaatggtcgtgcttcagtctggggtgcattagtgaccagctagcagggtcttgcctgtgtaaaccaaaagttatctgagacaggtctcaatgtagaaagcttattttcccaaagttaagaatgagcccatgacacagcctcaggaggtcctggtgacatgtacccaaggtggtcgggatatagcttgcttttatgcattttaagaagacaaattagctgggcttggtggcatatgcctgtagtcccagctgctcagaggctgagacaggaaaattgcttgaacccgggaggtggaggctgcagtgagccaagatcacaccactgcactccagcctgggtgacagagtgagactgtttcaaaaaaaaaaagaagacataagacatcaatcaatatgtataagatgtacattggtttcgcctgttaaggggggtcagcttgagattggggctgccaggtcataagtaaataaaagacaaaaggataaattcttttgagtccttgatcagccttccactgaatacaaaatttagtctggctcagtgaatctgcatttctaaattaacaataggggccaggcacagtggctcacatctgtaatcccagcactttgggaggctgaggtgggtggatcacttgaggtcaggagttcaagaccagcctggccaacatggtgaaaccctgtctcctctaaaaacacaaaaattaattgggcatggtggcgggcacctgtaatcccagctacttgggggctgagacaggagaatcacttgaacctgagaggtggaggttgcagtgaggtgagatcatgccactgcactccagcctggatgatagagcgagactctgtctcaaaaatgtaaaataaattagcaatagggcaggggaggcaatcagatattcatatgtctcaggcaagtctcagagggatgactttgagttctgtctgtcatttgttcacacaagaaatgtctgtgggcaaattgtgaagaaggtatgtagcttttatttatctttgtagctatcttatttagaaataaaatggaaggcagatttgcccgacatagttctcagattgacttttccagtggcttagtaattttcacgtcacgagatttattttcctttcacagcagggaccccttttattatcaagtgtatctgtttaaactagacagactaaaacaagatgtctattcataagttacaaatggaggttaatagaaaactcataaacacaaatataactatcctacatctttcaaaatagcccatcctaattcttccatttcttgttcactataattcatgtagatttttttcataattttatagtggatctcaatatcagaggtgttcaaaccagagcaactccatctcaaaaagtagctgggtaaaatgaggctgagacctactgggctgcatccccaggttaggcattcatagttacaggatgagataggagatcagcacaagatacactgcacttagcaatatgtcacaatcttccctgtgagcagggcacaggcagaatagaggagtcacatatttaggtcatggatgcagagatttgtcacaaaggccctgtgggtggggtcaagaaaggagcttcccatcccctaggtgttgggcccagcaatatatcacaatacccaatacacaggaaaaaggtagagtcatatcacctaggtgctcggtccagtgatatttcacaactgttctttgtgtggcagattctagtcaaaaaaggagagtcacaacacttaagtgatgaaaaatatgtcataacacctttctgaacagagaccatgcaggagactcatactacctaggtgttggacccagccatatttcacaatacacaatgtgtgcagagaccaggcacaaaaaaaaacaaaaacaaaaataagtcacgccagacgtggtggctcacgcctgtaatcccagcactttgggaggctgaggcaggcagatcatgaggtcaggagattgagaccatcctggccaacatggtgaaaccccgtctctactaaaaatacaaaaattaggccaggcgcggtggctcacgcctgtaatccctacactttgggaggccgaggtgggtggatcaccttaggtcaggagttcgagaccagcatgaccaacatggtgaaaccccatctctagtaaaaatacaaaattagccaggtgtggtggcacatgcctgtaatcccagttacttgggaggctgaggcaggagaattgcttgaacccaggaggcagagattgcagtgaggcaagatcatgccaatacactctagcctggtgacagagtgagactctgtctcaaaattaaaaataaaaaaagtcccatgttggggccaggtgcggtggctcacccctgtaatcccagcacttgggaggttgaggcaggaggatcacctgaggtcaggagttcgagaccaccctggccaacatggtgaaactccatctctactaaaaatacaaaaattagccaggcatggttgtgtgtgcctgtaatcccagctactcaggaggctgaggcaggagaatcactttaatccaggaggcggaggtttcagtgagcagagacatgccattgcactctagcctgggcaacacagtgagactccgtctaaaaaaaaaaaaaggtcacattttgtgcagagcccaaacagtagaagagagtcatatcacctaagttctgggtccagaaatgtcacagtaccctctgagggaagacccctggcagaaaagtcacatcatctaggtgagaggctcagagatatgtcacaatgccccctgtgggtagggctcaggaagaagagaaagatcacataacctaagagctgggccgagctacatatcacaaccacccagtgggcagggccaaagcatgagaaaagagtcacatcacataggtgctaaaccaagtgatacatcacaatccccactgtggacaggtcccgggaagaagaggagtcacatcatctaggtaatgggcccagagatatgtaacaagaacccctttgaacaggaaccaggcagaagtattacgttccctgtgtgctgatcccggggataagtcactctcttttatgggagcgtggcaatagcagcaaaaaagagtcacataatctaggtgttgggcccagagatatgtcacaatctctcctataggaaaaacctaagtaaaagagtcacatcacatagatgatggattcacagatatgtcactatgcctgctgtgggcagagttcaggaagaaggctcatatcacctaggttctgagcctgacaatatgtcacaatgcatgatgaggaaagggccaaggcaaaaatgtaacatcaccttggtgtttggcccaacagtatgtcacaatctacactgtgagcagaacctaggtagaagggaagaggcatatcagctaggtgccaggcccagtgataggtaacaatcctttctgtgagcagggacctggtagaaagagagagtcacgttacccgggtaatgggtacacagataggtcataatgcttcctgtaggcaggacccagcaaggagagttacatcacctggatgttggacatagcaatatgtcacaatggcccatgaaggcagggcacaggcaggagagtcacataatcaagttgtagggcccagcaatatgtcacaatgccctctatgggcaataccgaggcaaaaatatggatcacacaacctaggtgttggattcagcaatgtgtcacaatccaatttgtggcctgcaaaccaggcaggtgagtcaaatcactcgggtgctgggcagaggtgtatgtcacaattatagttgcagaacaatgtagagataaaattaacaatcccacacatgtcccatttctaggtattagagtcaacacttttttttttttttgagatggggtcttgctctgtcaccgaggctggagtacaagtggcgcgatcttggctcactgcaacctccacctcctgggtttaagtgattctcctgcctcagtctcctgaatagctgggactacaggcacgcaccaccacgcctggctaatttttgtatttttagtagagatggggtttcaccatgttggccaggctggtctcgaactcctgaccttgtgatccacctgccttggcctcccaaagtgttgtgattacaggtgtgagccaccgcgcctggtgagtcaacaccttttgttatgttcagtctgagtacacgagtcacagtctcaacggttaactggatacactgatgagagcctcaattgttgctggggactgtgtccccttagtggggtcaaagctgcacacgtatgctgaatcttggtctgagagtcaccaacccacatttcaacaaaatccgtgtatgagagtcaattttccaacttttggctatgtccaggtgtgatattcagtacttcaatagctgtgttcatgtggaaagatgacaatctttatcgttggctgggtgtgcataggagtgtcacaatgtcgcttgtgcactgggccctgttacagaactctctgtactaactgagagctttatacaatatgcatgatagtcacaagttgttctgagacctttgttgtagtatggactcaattgtacctgtggacctaagcccatgtattagaatcaacatctctccaattggctgggtccagagagaagagtcctcagctgcctatgagctgggtttagaaatgagacactaacttaactgtggtcacataatcacatgtgacagtcacaatttttactgtggactgcattcacatgtgaaattaaggatctcttcagtgggctctgtccatgtgtgagggctacaagttatgaaagtcaacattgtttggatgttgggtgtaactacacaagtcacaatctcaatgtgcatggatccatgcataagagcctcaatctctctgcaaactccctctcactaaattatatcctcacaggcgtgctgaatcttggtctgtgagtcaccaacccccctgtggaccaggttcacatatgagagtcaattttgcaactttccatgtggtaggttgtgcatgagagaaacacagtctcacctgtgtgcctggttctgtgatgacgctctttgtaccatgcaaagacattgcacaatatatgaaagaatgaccatcctttatgacgttcttactacagaagactcaggagtttattcatttctgtaagtctagctacaagtggcagtatctctcctattggctgttttgtggcgtaagtgtcatcatcacaaccatgagctgtgctaaagtgtatgtcacaatccaacctgtgagtagaaagcaaacaggagagtatcgtcacgtgggtgctgggttaagaatatgtcacaatttttccaaggcagggaccaggcaggagagtcaaatcacctggttgcctggccagggttatgtcacaattccctcctgaaagcaagacacagacagcaaagtcacaccactctggtgagctgggcctagctatgtcagaattctctctgtaggcaaagtctgggcacaagggacacaccaccttgttgatgaacccagagatatgtcacaatcttctgtgtggacatagtgcagatagaagaggagtcacatctccaaagtaatggatgcacagatatgtcacaagacctcctatgggcagaacccaggcaagagtctttcacccatttggtttgacccagggatatgtcataatacccaaaatacaaggaacccaggtgaaaaaggagagtgatatcacctagatgctaggtccagtgatatctcacaatcccccctttttatagggttcaggtagaaaaggagagttacatcacttaggtgataaacaaaaagatatgtcctaattcccctattaacagggcccatgcaagagagtcacatcacctgggtgttgaacccaatcatatttcaatatacacagttttcttttcttttcttttccttttttttttgagatggagtttttgctcttgttgcccaggctggagtgcaatggcatgatcttggctcactgcaacctccgcctccagggttcaagcgattctcctgcctcagcctcctgagtagctggaattacaggcacgtgccaccaagcctggctaattttgtatttttaatagagatggggtttctccatgttggtcaggctggtctcgaactcctgacctcaggtgatctgcccgcctcggcctcccaaaatgctgggattacaggcatgagccactgcgcctggccaatatacacaattttcaacatacacaatataaaatttgtaaatttaaatatggctgggtccaacgtctaggtgatgtgatccccctgcatgggccctgctaagggaattagggcatatcattttgtttgtcacctaagtgatgtgactcttcctttctacctgaaccctgtagcaggagaggagagtcacatcactaaggtgctggccccagtgataccttacaattcctccattggccgaacccaagcagtagaagagagtcacatcaccttgttgctaggtcaaaaaatatagcacaatattccctgaagaaaagaaaaaatgagcccatgaagcagagtcacatcatctaagagagggctccagagatatgtgaaaatgccccatgtgggtaaggttcatgaagaagagaggagtcacataacctaggaattgggactagttaaatgtcacaatcaccccagtggggggacccaggtatgagatgaaagtcacattatgaagatgctgagtcaagtgacatgtcacaatccccactatggacaggtctcagagacaaaaggagaggcacagcatctagtttatggacccagggacatgtcacaatgtcccctgtggatagggaccaggcagaaaaattacatcatctgtgtgctgaacccagtgataagtcactctcctttctgtggtcagggcccaggcaagagagaagagaaacatcacataggtgcttggcccagataggttacaatgtctcctagagaaaagctcttgtaaaagtagagagtaacatcaaatagatgataggtccaggaatatggcaaaattccccctgtaggcaaggtctaggaaggagattcacatcacctgagtgttagacccagcaatatgttacaatagcccatgtgggtagggcacagaaaggacaaacacattaccagggtgcagggaccagtgacatgtcacaatgccctctgtggcagcaccaagaaaaaagtacagatccacattatctacatgctgggttcaacgatgtgtcacaatcccacaatcccatctgtgtgctgggcccaggcaggagagtcaaatcactctgtttctgagaagcatgtgtcacaatcacacctgcagaaaggcccaggtatgagaagaacaattcctcacatgtacctgctctagttatgaaagtcaacactgtttggatgttgggtgtaaccacacaagtcacaatctcaatgtgcatggatccatgcataagagcctcaatctctctgcaaactctctctcctcaataaattacagcctcacaggtgtgcggaatcttggtctgtgagtcaccaacccccgttgtggaacaggtccacatatgagagtcaattttgcaactttccactgcctccgggtgtgagattcagaacttcagaatcttcagaacttcagaagtgggttgtgtttatgtaaaagggttgtgtttatgtaatatttactgttggctggttgtgcatacgggtgtcagaatgtcacctgtgtgctgggccatgtaaggttactcaatctgaggactttacacaatatgcatgagagtcacaatccactctgagacctttgtggtaccatggacccatgattatacctgtggctctaagctaaggaatgagaggcaacttctgtccaattggttgatccatataggagagtcctcaactgcctatgaactaggtttagaaattagtcatcatttcttttctggctggatgtttgcatatcacagtcacaatttcaaccgtggactgcatgtgcatgtgagattcagaacctcaccagggggctctgtccatattgaggtaacaatcataatggttggcagggtgttcatttaagaaacatgatctcagctatgttttcggcctgtcatgatgctctgtgccacctgagaactttttacaatatttaaaagtggtgggccaggtgcagtggctcatgcctgtaatcctagcactttgggaggcccaggcaggcagatcatgagttcaggagtttgagaccagcctggccaacatggcgaaactctgtctctactaaaaatacaaaaaattagccaggtgtggtggcaggcacctgtgatcctggctactcaggaggctgaggcaggagaatcacttgaaccaggaggtggaggttgcagcgagctgaggtgacgccactgcatgctagcctgggcgacagtgtgagactccatcttaaaaaaaaaaaaaaaagaaagaaaagaaaaaagaaaaaaaaaagagtggtgactctctatgacctttgcaaatagaggagactcgggattatgtttgtttttctaaggctagctaagagagggtgtatctcttttattatctggttcgaggtatgagaattattacagcaactgtaagtggggacaagacatatgtcacaattacatctctgggtagggagggggcaagagagtcacacctggggctagttcagagatatgtcacaatattttttaagggcaaggaccaagcaggagagtcatatcacctaggtgcttggcgagggatgtattaaaatctctgcctgtaagatgggcgcaggcagcaagtcacatcacctgggtgctgggcctagtgatatgttacaatgttttctttgggcatgatgcatatagatgagaagagtcacatttcataggtgacaaatgccaaaatatgtcacaagaccccctgtgggcagcgcccagataggagcctcccatttcctaatgtcaaacccagtgatatgtaacaatatgcaaaatatgtaagatccaggcaaaagatgaaagttacatcatctaggtgctaggtccagtgatacatgataatcctttttttggcaggttgcaggctaaagaagagtcacaacactcaggtgatgaatgaaaagataggtcatctactcttgtggtcaaggcttatgtagaagactcacatcactgggctgacagacccggctatatgtcacaatacaaaatctatgcagaacccagacaagagaaaagaatcccgtcatgtaggtgctgggcccagtgatacatcacaatccctttttggtcaaagtccaagtagtagaggaaaagtcgcatcacctaaatgctgcatccagcaacatatcacaataccccctgagaggagagtccaggcagaaaagtcacatcaccaaggttaaaggcccagagatatttcataatgttatctgtttgtagggctccagaaaaatataggaatcagataacataggagctgggcacacctatatagcacaatcaccacagtgggtagagcctaggcatgagagaagagtcacatgacataggtcctcagccaagtgatatgttacatttcccactgtggacagattcaggaaaaaaaaaaaaaggagaggtctatcattaggtaatcagattcagaaaaaaaaaagagagatctatcgtctaggtaatcggcccagagatatgtcacaatgaccacttgggcaaggaccaagcaaaagaatcacatcccctgtgtgctgaacccagcaataagtcactcttccttctgttagcatgacccaggcccaaagatatattacaatctaacctatgggcaaagcccagataaaagaggagagtcacataaaatagctgatgggctcagagatgtgtcaaaatattttcagtaagtggggtgggtccaggcagaaaactcacatcatctaggtgtagggcccagcaatacgtcacaatgtcttacatgggcaggaccaagaaaaaaaaagagtaatatccatttggtgctaggttcagcaatattccacagtctgtttttcaggaaaaactaagaaataaaagaagagtcacatcagctatatgctgtgaaaggtcaaaatccttcctgtgagcagacagcaggtaacagaagagtcacatcacctgtgtgattgatgcaacgtcattccaaaatgccccctgtaggccaggtgcaggcataaaagttacatcacctcattgttggacccagcaatatctcacaatggcccaagtgggcaaaccgcagacagaagaatcacataatgtcagtgcagagtcgggcaatatgtcacagtatcctctgcaggcaaaaccaagaaaaagattagagtaacatcagctaggtactgggcatagcaatatgctacaatttccctgtaagcaaagaccaggcagaagaagagaatcacatcacctggatgccgggcccagtcatatttcaacaatctttcctgtaataaagacccaggcaggagaaacacatcatctggttgctgaccacagcaatatgctacaatttttcctgtaggcagcgtgcaggcagaagaggagagtcacatctcctaggtgatgagtgcagaaatatgtcacaatgccccctataggaagtgcccaggtaagagattcccatcccttaggtgttgagcctagcactatgtcacaatacccaaatatgtgtggcctaagaaaaagaggagacttacatcacctagataggccagtgatgtttcacaatttctctgagcagagaccaggcaggagaagagagtaacatcatcatggtgataggcattcagttatgtcacaaagatgcctcctggcagggcccaggaagataatgttacatcacctgggtgttggacccagcaatatgtaacaatgtctaatgtgacatattttgccaaaatatggcacaaaatacagggcacaggtggcagagtcacataacaggggtgcaggatccagcaatatctgacaatacccaaaatttgtggggtcccaaaaatagaggagagtcacatcacctaggggctggctccagtgatatatcacaatctcacctttgggctatgaccaggtagaaaagtcaagtcactcaggttctgattagaagtgtatgtcacaatcacatctgcagaaaggtccagtgatgaattaacagtcctgcacaggtcccagttccaggtatgagagtccccacattctctatgttgggtctaagtatgatagtgacaatctcaccaataaagtggatccatgtatgagattctacatacctcctgtgaactgtattcgctgtggccttaagcccaggtatgggagtcaacatgtccccagttggctgggggacatgttgactcccatacctgggcttagatagatagaatactcacgggttcagatagaagaattctcacctgcctatgaactggatttagaaatgagtcgtcatgccaggctccgtggctcatgcctgtaatcccagcactttgggaggctgatgcaggtgggtcacctgaggtcaggagcttgagaccagcctggccaacatgatgaaaccccatctctactaaaaatacaaaaaattagccgggcatggtggtgggcgcctgaaatcccagctacttcggaggctgaggcaggagaatcgccttaacccaggagatggaggttgcagtgagccaagataatgccattgcactccagcctgggcaacaagaatgaaactgcatcccaaaaaaaagaaagaaaaaagtcataattccaactctggctggatgttcatgtatgacagtcacaatttcaactgtggaccgtgttcgtgtgtgagattcgagacctcaccagtgggctctggccacgtgtgagggtgacaattttaatagttgctggggtatgcatatgagaaacacaatctcacctgtgttctgaaccctggaatggcaatctctgtacaattagagatttatatagtatgcaagaaagtggatattctctataacctttgtaaaagaaggagagccagcattttactcattattttaagcctagcaataagaaacagcatctctcctactgactggtttgaggtatgaaagccaccgcactcagcatggtaaatcatttctaaatccagttcatagccggtgagaattcttctatctgaacccgtgaggtatgaggtatgagagtcatcatcacacctgtgagctgggccaaattattttaaaatctcacctgtgaatatggagagacaagagtcacaacacctgggtttttggccaggaatacatctcaatcttttcttacagcagggaccacacaggagtgtcacatcaactgaatactcagccaggaatatgttacgactttctcctgaaagcaggacactgacagtagagtcgtatcacctgggtgctgagcccagcaataggtaacaatgctctctgtggtcaaggcccaggtaggagagacacctggtacctgggcctagtgacaattcacaatttttcctgtgggcagagtgcaggcaaaaatggagagtcacatctcctaggtgattgatgaagagatatgtcacaaggccctctctagacagggcccaggcaggagcctctgattttataggtgttcagcctagtaacatgtcctaacatgtgaaatattcagggcacgggcaaaagagaagagtcacataacctgagtgcagggcttagcagtatgtcataatccaccctgtgggcagcaccaaggctggaagagaaagtcatatcttcaaggtgcagagtcaagcgatatgtcacaatcttatctgtggactgggtcaaggcaggaaactcaaatcactaaggtgcttagcagatgcacacaatcacacctgcaggaaagtccaggaatgagattagaaattccatacatgtccaggttctaggtatgagagtcaacacctcctggatgttggatctatttatctattttgtttttgcttttgtttttttgagatgaagtctcactcttgtcccccaggctgggatgcaatggtgtgatctcggctcactgcaacctctgcctcccaggttcaagcgattctcctgtgtcagcctcccgagtagctgggattacaggtgcctgccaccacgcgcggctaatttttgtatttttagtagagatgggggtttcaccatgttggccaggatggtcttgaactcctgacctccggtgatccgcctgcgttggcctttcaaagtgctgggattacaggcgtgagccactgcgcccagccttggatgttggatctaagtgtgtgagtcacagtctcaatggttgacagaatttttgcaagacagccacagtttattctgcagacttgtcctttcagtgcagttacagcctcacatgtgtgctgaatcttggtctgagagtcactagcccacctgtggagcagatccacatatgagagtcaattctctaacttttgacagcctccatgtgtgatatttagaacctcaacagtgggatgtatttttgtggagaatgacaatctttactgttgcctgggtgtacatttgagaaacactatctcacctgtgtgctgtgttctcttatgacactctctgtgtcacctgaaggctttatacaatatgcaagaatggtgatcctctgtgaccttcatacaggaaggagatccagagtcttccctgtggttctacgtccagatatgacagtcaacatctctccaattggttgagtccagataggagagtcctcaccttcctacaagctgggtttagaaatgagtcaccatcccaactgtggccagatgttcacttatgacagtgaaaattccaactgtgaacggcattcacgtgtgattcaggacctcaccagtgggctctgtccatgtgtgaggataacaattctgaaggttagtggggtctgcataggacaaacataatctcacctgtgtgctgggtcttgttatgacattctctgtaacatactaggtctttatagatgtgagaaattggtaattctctatgacttttgtacagaaaaaagactttgttattttcctaagcctacctaggggcaacattatctctcctattgccaccttcgaggtatgacagtcatcattacatctttgttcttggccacaatatatgtgggtaaagagcaagcataagagtgacattaactgtgtgctggaccaggggtatgtcacaatcttccctgagggcatggaccaggaaggagagtcacatcacggggcactcagccaaggatgttacaatttcctcctaaaagcaggacacaggcagaagagtaagatcacctggatgctgggccaggatttagtcacaaggctcactgtgggtgaggcccagagaggacagacacaatacctggttgctgggcctaatgattgtcacaatcttccgagtgggcagaatgcagaagtagacagtttcatctcctgggtgatggatacagaaatatgtcacaaggccccctgtaggaagggctcagtcagaaaccttccaacccctaggtatttgttctaatgatatgtcacaacatccaaaatatgaagatctcaggcaaatgaggagagtcatatcgcctaggtgctggacccagtgatctgtcacaatcttttcttttggcaggcctcaagcagaagggaagagtcacaccacccaggtaataaatacaaagatgtgtttaatatatctgtgggagggcccatcacctcagtgttggacacagagatgtgttgcaatacacaacgtatacagggcccaggcagcagaggagagtcacatcacctaggttctcagttcagcaatatttcacaataccccctgaggagaaggcctaggcaaaaatgtcatattatctaggtaaaaggctagggatatgtcacaatgccttctgtgggtagggctcataaacaagaggaaagacataacctagatatggggctcagctttatgttccaatcaccccactgaaaagggcccaagaatgaaagaagagtcatatcacaattcccactgtagacaaaccccagaagaggagagtcacatcatgtagaaaaaagaaggcatttacctgggctttgcccataggagaaattgcaatgggtcaagagatatgttacaatgcttcctgtggtcagggttcaggcagaaaactcacataatcttggtgctggacccagcagtatgtttcagtgttttctaagggcacagccagagcaaagaagtaacatcaccttagggttagatgccacaatctcatttgtgggcagaaagtaccccctgtgagtagagaaaagggaggaaaaaaaggcacattccctcagtgattggtgaagatatatattacaatgacttctgtagacagagtccagaatgaagttacatcacctgagtgttggactcagccatgtgtcacaataacccatgtggaaaggacacaagtaagagagtcacataacctaggcctaacaatatgttacagtacacctgtgggcagcatcaagaagaggagactcacatcacctgggtgcatggcccagtgatatatcacaatgccccctgtgggttgtatcaaggcaaaatagagtgacattaccaagggtctgggtcccatgatatgtcactgtgagctgggcccaggtgagagagtcaaataactcagatgctgggcagagtcacatgtcacaatcagacctgtaagaaggtactgtggtgacattaaaaatgacattgtcagccaggtgcagtggctcacacttgtaatcccagcactttgggaggctgaggcaggtggatcacctgaggttaggagttcgagaccatcctggccaacacggcaaaaccccgtctctatcaaaaatacaaaaattagctggatgtggtggtgtgtgcctgcagtcccagctactagggaggctgaagcaggtgaatcacttgaacctgggaggtggaagttgcactgagccaagatcgtgccactgcactccaggttgggtggcagagcaagactccgtctcaaaaaaaaaaaaaaaaaaaaaaagaaagggctaggcacggtgtttcatgcctgtaatcccagcatttgagaggccgaggcgggtggatcatgaaatcaggagttcaagaccagcctgcccaagatggtgaaacctcatctctactaaaaatccataaaaatttgcctggcgtggtggcatgcacctataattccagctacttgggaggctgaggcagagaatcacttgaacccaggaggtggagtttgcagtgagccgagattgtgccaccgcactccagactgggcaacagagcaagactccatctcaaaagaaaaaaatatgacattgtcttgaatcaaggaatgagagtcaacacctcctacatgttgggtttaagtacaagaaatcacaatctcagtggtggactggatttgccaatgagcctcaatttctcttgcaaactctgtgccttagtgaagttacagccacaaaggtgtgctgaatcttggttaaagagttaccaacctggccaggtgcgatggcttacgcctgtaattgcagcactttgggaggccaaggcgggcagatcacgaggtcaggagattgagaccatcctgactaacacggtgaaaccctgcctctattaaaaatacaaaaaattagctgggcgtggtagcaggcacctgtagtcccagctacttgggaggctgaggcaggagaatggcatgaacccgggaggcggagcttgcagtgagccgagattgggccactgcactccagcctgggcgacagagcaagactctgtctcaaaaaaaaaagtcatcaacccaactgtggacagtatccatgagtgagagtccattttccaacattcaattgcctccaaatgtgaaattcagaacctcagaagtgggttgcgttcatttaagtgaatgatttgctgttggctaggtgtgaatatgagtgtcacaatctcacctgtgtgcttgtccctgtcaggacacactctgtaccacttgagggctttatatggtatgcatgagttgcaatctgctctgagacttttgtgctcctatggacccatgatcttatgtggccctaagtctaggtatgagcgtcaacatctctccaattggctgggtccagagaggagagtcctcacctgcctatgagctgggtttagaaatgagtcaccatctcaactgtggccagatgttcacatatgatagtcacaatttcaactatgtactgcatctgcgcgtgagaatcatgaactcatcagtgggttctgtctgtgtgtgagagtggtaattctaaaaattggcagagtgtgcttacaagaaacacaatctaacctgtttgctatgtcctcatcaccctctgtaccatccaagagctttatacaatatatgagagagtagtaattatttataaccttcatatagagaggagacccaggattttacccctttttctaagcctagctgtgagagacagtatctcttcaattggctagtacaaagtcttagagtcatcatcacacctgtgatctgggccaagatatatgttaccaaccaacctgttagcagaaagcatccaggagaatcacatctcctgggtgctggaccaatgatataaaaaatccttccctgagggcagtgaccaggcaggagaatcacatcacctggtttctcaactagtgataggttaccatttcttcctgaaagtaatgcacatggaggagacacacatcacctggtggctggaccctgcaatatgtcacaatctttcctgtgggcaggtagaaaaggagtcacatcttttatgtaatggatgcagataaatgtcacaaaaacccttgcagacagggctgaggcaggagcctcccatctttcaggtgtttggcccagttaaatgtcacaatacccaaaaatgtggttcgcaggcagaagagaagagtcacattgcctaagtgctagttccagtgatatgtctcaatctttccctttggcagggtccagggtgaagagaggattcacacagcctaagtgatgaaggaaaatatatgtcctaatatgcccaggagcagggcctatatgagacagttgcatcagctgtatgttgaacccagtgatatgtcaaaacatacaatttatgcagggcccaggcagaagagagtgtcataacctaggtgtcagtcccagtgatacatcacatacatcacaatgccttactttttgttgttgttttttttgttttgttttggcgaagtctcactctgtcaccacggcaacctccacctcttaggttcagcgtccagggatatgtcccaatccctctttttgtcaaggcccagccataagtagagagtagcatcacctgggtgatgaaagaaaagatatgtcatcatacccctgcaggcaaagcccatgcaggagagtcacatcacctaggtgtggggcccaacgatatattaaaatctcttcttgggtatatcccaagcagtagaggagagtcacatcacctaggttctcagtccagcaatatgtcacaaggccccttgaggggaaggcccaggcaggagagtcacatcacttaggttaggggccaagagatgtgtcacaatgttccctgtaggaagggctcaagaagaagaggagagtaacatgacctaggggcttggtcaagttatgtgtcacaatcatacctgtgagcagggtctaggcatgagaggagagtcacatcaagtaagtactgggccacgtacatgatgtatcacaataacccatatagacaggtcccaggaagatatcacctaggtgctaggtccagaaatgcatcacaatgtctctcatgggcaaacaccaggaaaaaaagggaaggggataacatgaacaatctgatgggccaagagatatgtcacagtgcccactgtgggcagggtccagccaggagacgcacatcaccttggtgttggacccaggaatatgtcataatgccttctgagggcaggcccaaggtgcccagcaacatgttacaatctcttctgcaggcagaacctagaaagaagagttgagtcacaccagctaggtactgggctcagcaatatgtcacattagtttttgtgagaaggaactaggcaggagaagaaagtcacatcacctgggtgatgagcaaagagatatgtgacaatgactcctataggcagaacccaaacaaattagttacatcacctaggttttggacccagcaacatgtcacaatggcccatgttggcagagcacaggcaagagagtcacataacttgtaggggacagcagcgatatgtcacaatgctcactgtggacagtaccaaggcagaaaacagaacttccatcatctgggtgctaggcccagtgatatgtcacaatgtcccatgtgaaagcacagaagcaagagaatacagtcacatcacctagtttctggtccagcgatatgtcacaatttcatctgtgggctaaatccaggcaggagagtaaactatacagaggcatatggcacaatcacccttgcgtatacagaggcatatggcacaatcgtgcttgcaggaaggtccacagatgagatcaacaattctgtacatatcctgcttctgtgggcaccaggaagacaggagaggagactcacattacctgggagcaaggctctgagatatgttacaatgtcctttttgggtagcaccaaagcaggagaatagagttacgtcacctaggtgctgggtccagcagtgtggcacaatcctatctgtaggctgtgctggtgctaaagagtcacattactcaggtgcaaggcagaggtgtatgtcaaaatcacacctgcaggaaggacaggggatgagatgaacaatactgtacatatcccgattctaggtatgagagtcaacacctcctgtatgttggttctaagtacactagtcacagtctctgaaatgaactgaatcagtgcatgagaaactcagtccctcttaccactgtgcctccttagtggaatcacagcctcacaggtgggtcaaattttagtctgaaagtcaccaacttacctttgaactggatccacatatgagagtaaattttccaccttgcaactgcatctgtgtgagattcagaacctcaacagtaggctgtgttcatgtgagaagatgacaacatttactgtcggctgggtgtacatatgagtgtcaaaatctcaactgtactttgggcccagttagaacatgctctgtaccagccaagtgttttataaggtatgcataagagtcacagtcctttgtgactgggagacattcgtgctggtttggactcatgattgtgcctgtggctctatgcccagttataagagttaacttctctgcaatggctcagtccagatataagagttgtcccctgcctataagcttggcttactaaggagtcaccacctctgctgttgcctgatgttcacatacgacagtcacaatttcaactctgcactgcatccacctgtaagatttaagacctcaccagtgggctctgtccatggatgagagtgacaatcttttttatttttatttttatttttatttttatttttgagacagagtcttgctgcgtcacccaggctggagtgcagtggcaagaccttggctcactgcaaactccacctcccaggttcagccaattctcctgcttcagcctccggagtagctgggattacaggtgctcaccaccacgcccaggtaatttttgtattttagtagagacacggtttcaccatgttggccaggctggtcttgaactcgtgacctcaagtgatccacccacctcggcctcccaaagtgatgggattacaggcatgagccaccaccccggccgacggtcttaacaattggcaaagcgtgcatacaaaaaacacaattgcacctgtttgctgggccctgttatgacactatattacccgagggtttatacaatatgtgagagagtgtaattttctctgaccatcctaaagaggagagccaggattttatccattttcctaagcctagctatgagaaacagcatctcttctattggctagtttgaggcatgagagtcaacatcgcacctatgatctaaacaaagatatatgtcacagtctcacgtgtggatagggcatgcacaggagagttacgtcatctgggtgctgggccagggatatgtcacaatcttccctgagaacaggaatcaggcagaagtgttatcacctgggtggttggtcagagatacgttacaatttcctcctgaaagcagggcacactcagtagagtcacatcatttgggttctaggcccagtgatatgtcacaatgctccctgtgagcaaagctcaggcaggagaaacacatcacctgatttctgggccaaaagatatgtcacaatctctcctatgagcaaagccttggtataaaaaaagagtcacatcaaacagttgatgctcccaaagatatgccacaatgttctctgttatcagggttcatacaaacaacccatgtcaccttgttgctgggcccagcaatatgtcacaatgccttttgaggtccaggccaagacaaaacagtaatgtcacattgttgttaagctccacaagatgtcttaatatctctcgcaagcagaacttatgaagagtcacatttgtttggcactgggacaagtgagatgtcaaaattccccatgtgagcagggaccaggtaggaaatgagagtcacatcatctgggtgacgggtgaagagatatgtcatgatgttctagaacctaggcagtagaattacattaccaggtgttggacccagcaatatgtcacaattgcttatgtggtcggggcacaggcatgacagtcatataacctgggtgtaggcccagagatatgtcacaatgccccctatgggcagtgccaaggcaggagaggagactcacatcacctaagtgcagggcccagcgatatgtcacaatgtcctctgcaagcagcaccaatgcataagaatagagtcatatctcagatctgggttcagcaatattcactatcccatctgtgggctggtcccagggaagagagtcagattactcaggtgctggggagaggaaaatgtcacagttaaatctgcaggaaggtccagggatgatactagcaatcccatacatgtcatgattttaggtataggaggttaaccccttctatatgttgtgtctaagaacaggagttataatctcaacggtggactaaaattgtgcctgagcgcctcaactcctcctgtggactttgtctaattagtgaagtcacagcctcataggtgtgctgaatcttgctctgagtgtcatcaactcacctgtggactggatccacatctgagagtcaagtttccgacctttgactgcctatgggtgtgagattcagaacctcaaaagtgagctgtgttcctttttttttttttttttttgagacggagtctcgctctgtagcccaggctggagtgcagtggcacgatctcggctcactgcaacctccgccacccgggttcatgccattctcctgcctcagcctcccgagcagctgggactacaggcgtccaccaccatgcccagctaattttttgtatttttagtagagacggggtttcactgtgttagccaggatggtctcaatctcctgacctcgtgatccacccacctcggcctcccaaagtcctgggattacaggcgtgagccaccgcatccggccaaaagtgagctgtgttcatttgagaaaatgatgatgtatactgttgggagggtgtgcatacaactatcacaatctcctgtgttctgggccttgttaataccctctttaaaataccccaaagctttatacactatgaatgagaatgacaattaactctgagatcatgtttgtaaacacccatgaccatacctgtggccctaagcccagatatgagtgccatctctcctattggctgggtccagacagtagagtcctcatctgcttatgttctgggtttagaaatgtgtcaccattccaactgtagctggaggctcacatatgacagccacaattccaagtgtggactgtgtttgcatgggaaattcaagacctcggcaatgggctctttccatgtgtgacggtgataatcctaatggttggtgaggtgcacatatgagaaacacaatttcatctgtttgccgtgccctgtgatgacactttctgtaacacctgaaggcattatatgataggtaggtgggtggcaatcctttataaccttcatacaaagaggagacccagaatgtcgtccatttttctaagtcgagctatgacagtatttcttctaatagctcatttgacgtatgagagtcatcattgcacttgtaagctgactacagtatatgtcacaattttacctgtaggtagggagctagcaggagagtcacatcacctggatttcagccaaggtatctcacaatcttccctgagggagggagccaagcaggagtgtcacatcacctgggtgctcagccagggatatgttacaattctctcctgaaagcacagcacaggcaacagactcacatcacctgggtgctgagctcagcactatgttacaatgctccctggggacaagacagaggcagaagagccacatcacctggtgtctgcttccagggatatgtcacaatctttcctgtgcaggccagggtaccggcaaatatgaaatgtcacacattctaggtcatggatgcagatatatgtcacaaggtccctgtgggcagagcccaggcaggagcatgcaatctcataggttttggacctagtaacgttttacaatatccaaaatatgcgaagcccaggcaaaacaagagagtcacatcacctaggtgctgggttcagtgatttgccacaattcccccttttggcagggtctagtcaaaagaggagaattatatcacctgggtgatgaatgaaaagatatgttataacatctctgtaagcagggcccatgcaggagattcacatcaccaaggtgttagaaacaatcacatgtcacaatacgcaatgtacaggaggaaccaggcaggagaggagagtcacatcccctaggtgttggacccagcaatatattacaatcccttcttgggaaaagcccaggaagtagaggaaagtcacattacctgggtactaggcccagtgatatgtctcaatgtcctctgtgaaaagcactaaggcaagagaagactcacatcacctaaatgctgggtccagcaatgtggcacaatcccatctgtacactgggcccaggcagaagagtcaaatcactcaggtgctgggcagaggtgtatgtcacaatcacatctgcatgaaggtcaaggtatgagattaacaatttaacacattttctagatctaggtatgacatataacacctcctggatgttgggtctaagaacatgagtcacaatctcaatgatggtctggatctgtgtgagaacctcaatccctcctgcaaactgtgtccccttagtggagtcacagactcacaggtgtgctggatcctggtctgagagacacctcccttatgaaagatagttacacatgtgatttgatttttcaagtatgtctgcctctgggtgagattcagaatctcaacagtgagctgtgtttatgtggaaggatgacagtctttactcttggcaggctatgcatatgagtgtcacaacctcccctgtgtgctgagttctgttaggacattctttgtacctcttgacaactttacacagtatgtgagagagtgttaattctttatgatcttcatacaaagaggagacccaagacattactcattttcctaatcctggctatgagagacagtatgtctgctattggttactttgaggtatgagagtcatcattgcacctgtaagctgggccaagatatgcatcacaatcccaccagtgaagagggactgagcagtagagtcacatcacctgggtttgggggcagtgatatgtcacaaacttctctgagggcagagaccaggcagcagtgtcacatcatctgggtgctgggcccagtgatatgttaaaatgttctttgtggtcaaggcccaagcaggaaaaacacatcacctgattgctgagaccaatgatttgtcacagccctcccagtggtcagggtgcaggcagaagaggggagttaaatctcctagattacggatgcagagatatgtcacaaggtcccctatgtgctgggcccaggcaggagcgttccatcccatggctgttgaactcagtgaaatgtcactatacccaaaaggtgccaggaacagggaaaataaaagggtcacatcacctaggtgatgaaaaagatatgtcgtaatactgtgggcagttcccatgtcataaagtcacatcaccttggtgttgaatccaggcatatgtcacaatacacaaagcatgcaggccttaagcagaagaggagagtcacatcacctaggcggtgggcccagcaatacatcacaattcctgcttggacaaagcccaatccatagaggagagtcacatcacctatgtactgggctcagcaatatgtcacactgtcctttgtggggagggcccatgcaagagagtcacatcacctaaatgatgggctcaaaaatatgtcaaaatgccctctgtgggtagggctcagaaaaaaaagaaaatcgcataacccaggggctgggtccagctatatgtaataaacaccctagtcggcagggcccatgcatgagagaagagtcacatcacctaggtgctgggttcagtgcaccatactgagaccttgtctctactaaagtaacaatacttttttggcatggcccaggcagaagaggagtgtcacatcacctaggtgattaatagaaaaatattttataatacctctatgggcagggcccatgcaggagagttgtgttatccaggtgttgaagccagtgacatgtctcaatacacaacgtatgtaggtcccaggctggagaggagagtcacctcatctaggttcttgacagagtgatatgacacaatccctttttgggtagagaccaaacagtagagaatagtcacatcacctagatgctgggctcatcaatatgttacaataccccgagaagagggtccaaacaaaagagttatatcatctaattgagggtctcagagatatgacacaatgccccctgtgggtagggctcaggaagaagtgtgcagtcacataaccttgaggctgggcccagctacatgtcaaaatcaccccagtgggcaaggcccaggcataaggacagagtcacttcatgtaagttctgggccaagcaatatgtcacattccccactgtggacaggtcccaggaaaaagagagtcatataatctcagtgatcagccaagatatatgttacagtgacttctgtgagccggaataagagtcatattacctgtgtgctgaactcatcaataagtcactctctcttcggtgggcaagccccaggcaggagaggggagacatcacctcggtgctgggcccaaagttatgtcacaatctctttttgggcaacatctaagagaggagagacacataatatagtcaaagggcccagagatatgtcacaatgcaccttgtaggcagggtccaggcaggagactcacatcacattggtgctgggcccagcaatataccaccatgccttctgagggcagtgccaaggcaaaagagtaatgtcacctggccgggtgcggtggctcacacctgtaaacccagcgctttggtaggctgagaggggctggatcacctaagttcgggtgttcgagaccagcctgaccaacatgcagaaacgtcatctttactaaaaatacaaaaacaaacaaaccaacaaaccaacacaatatcaccttagtattaggctcactgacatgtcacaatatcccctgcaagcagaacctaggacaaggaggagagacatgttagctaggtgtgcacccagtgatatgtcacaatctcttctgtgatcggggccaggcaggagagagagccgcattacctgtgtgatgggtgcaggtatatgacacaatgtcctctgtaggcagggcctaggcagtagagttatatcacctgggtgttggacccagcaatatgtcacaatgacccacatgcacagggcacaggcaggagagtcacataacgtatgtgtgggacccagcgatatgacacaatgccccccgtggaagaaccaaggcaggagagaagattcacaccacctgggtacaagacccagtgatgtcacaatgtcccctgtgtgcagtgccaaggcagtagaataatcacatcacctcagtgttgggtccagtgatatgtcacaatctcttctgtgggctgggccagggctggagcaccaactcactctggtgctgggtaaagtcatatgtcataatcacactgtcaggaatgttcagcggtgagattatgcatctggagtgggaagaagcaacacatcaaaaatatgaccagaccatccacggcggctcatgcctgtaatcccagcacattgggaggctaaggtgggaggatacgtggagcccaggagttcaagactaccctgggggctatatggcgagacatctttattaaaaaatgataattaaagtttaaaaagtaatatatataaccacagcctggacaacatactgagaccatgtctctactaaaaaaaatagatagatagatagatagatagatagatgatagatagataggtagatagatagagccaggcacggtggctcacgcctgtaattccagcactttgggggccaaggcctcactcaaaaagaaaaaaaaaagaagaaaaaagaaatctaaaacaacagcaacttcagtgtgcaggaaggagcaagagaaagacaaaagaaacagaaaaagaaagaaataaataaaaataaaacagcggccaggcgcggtggctcacgcctgtaatctcagcacttcgggaggccaacgcgggctgatcacctgaggtcgggagttcgacaccagcctgaccaacatggagaaacctcgtctctgctaaaaatacaaaattagccaagtgtggtggcacatgcctgtaatcccagctactcgggaggctgaggcccgagaaccgcttgaacccaaaaggcggaggttgcagtgagccgagatcgcgactttgcactccagcctgggtaacaagagcaaaactccgtctcaacaagcaaacaaacaaaaaacagcaactcaatgtactgtggaaacaaacttgaagtggggctaggaaaacaaaaaaaagaaaacaaaaacagaaagatcccctgagcctcagctactcggaggccgaaaagaaaggattgcctgggtgagcccgggaaggtggaggtcgcagtgagcagtaatcgcaccctctactggatcttagcggttctgcagccgaggagagccatctggtccgtcttaaatatttcaagctggtggccaagtcctacactcttggccgacatctggtggacccggcggccggactgagaagccagcaggtagaggcccagcggatccaccctacaggccaagggtggcgctcgcggcctgaagctgtttttctggcatctaagtcgccaaccttccttcccaccgcgcccccaacccccatctgctgatcgatgtgggcggtggaaagaggagcaagggctcaagcgcagggactgcccccccggtgaccatcccacccgcggggtgggagagggcagggacccagactgccacccccgggccctcacagccatacctgggatggggcctgccgggccacacccccggacacctgcaactgaaccatccataccatgcttccccagccctatcccagccggtggatcgagctgccaccacccccactcccaggaatgaggggaggagccaggaaccagaggggtgggaggccaagcaggggagccccccaacccaaggcacccaccacgcagcacgccgtccctttcggcgctcggaaagccctcgggcgaacccctcccgagcccacccctcccgggacctcagaagatggctcaggacggcccctgactctccatggggacttgggaataaactcggcaggcgcctcagacagtcgggaccagcgtgggcgtccctggccccctgcgtcaggcctggtgggtcctgcgggtcgggcctcggcagttgcagtgcgcttgggatcagccggggcagccccacactcggctcgggctgggagcgcggggacagcctcccaagccacagccctgcgcgcccgacctccgactcacaagggacgcgccagagctctggtcccattgagacagttcagctgaaggctgcgggccttcccgagctccgcccagctcacagcggggacggtccctccctcggcagctgccgctggagctccggaggacaagagaacttagagaggtggcctcagtggagcccgacaaccagcgcgaacgtcaacaagacagatcgagatggcaagggcagctcgtgggcgaaatggatccacccgaccccagaaatgatccccgatacgtggctctgcatagaccacgacagagtccagtcaaagacaacccgtgggtgtgggtgtttgcagatgcttggagatgcatctcagcgggagaaagaatgaccaggactcggtagtgggtggtttaggacacagggagatacagaatgaggagactgtcccagaatccacacaaagacggacagacgacgaacggaaggaaggaaataaaacagaaaaaaaaaaaagaaagagaagagagagaaaaaaaatgaagaaagagaaagaaatatcaaaagaaaaatagagaaaataatgaaaagaaaaagggaagatgaaaaaggaaggaaaaaggtggagagacacaaaaagaaaaaggaagaaatgaaggaaaaaaggaaagaagaaagagagaggggaaaaaaagaatacaaagaaaaaagaagaaaataaaagagggcagagcatggtggctcatgcctgtaattccaacactttgggaggctgaggtgggagaatcacttgagcctaggaggttgagaccagccctgacaacatagtgaggccctgcctctactaaaagttagccaggcatgatgccacattcctgtagtaggaaggaaggaaggcaggagaggaggaaaaaaagggaggaaggtaggaatgttgagagaaaggcaggaaggaagacaggagggaatgaaggaagttagggaccaggttctacaaggaggaaatgttaaaaagaaacagagaaaaagaaaggaagagagaaacacaggaagaaaaagggaaggacagtaagaaagagacagaaagggagaaattatgaaaatagaaagaaaagaaaaaaagtagaaagatgaaaatacatctctaaaagaataataggcggggcatcgtggctcatgcctgtaatcctagcactttgggaagtccaggtgggtggctcatgaagtcaagagatcaggaccatcctggccaacatggtgaaacctcatctctactaaaaatgcaaaaatttgctgggcatcgtggtgcgtgcctgcagtcccagctacttgggaggctgaggcaggagaatcacacatacacacaaaacctgctgcctcaggctttaaacacacacgttttctgtaatccaggctcatttgattgtgagggctgttgtcagaaatgttactaagagaggaatatgcataaattagatcacatttaaggttatgcttataatgccacttgagtgggaagcaagagagtggagttacaggcacccagctggggtttacccacaccaggttggttctttctctttttttttttttttgagacagagtatcactctgtcactcaggctggagtgcagaggcatgatttcagctcattgcaacctccgcctcctgggttagagcagttcttgtgcctcagcctccggagtagccggaattaaaggcacgtgctactatgtccggttaatatttgtatttttagtagagacagggtttcatcatattgaccagccttgccttgaactcctgacttcaagtgatctgaccgccttggcctcccaaagtgctggcattacaggtatgagccaccgtacccggccaaccaatgccagtttctaggctcatgagagtgtggcacaggtaaacatcacctgtcattggtgacagaagaaaaaaggctggagggaagaccaggtgggggagaggtggtaggctgtggggctagaccctgggcatgctggacctgttaggtcactgaacatctatctggctggccacctgccccttcacgtcagttgaggaaaggggattgggcagcattctccataagtcccactgtgctgtgaggatggaggagtgtctacaaattgccatcttagggtaggttttagtgtgagctggactctcttggagagccaatgagatgggaggaagacagtcccccaggtaaaccttagggacagagcctgtgaagtaagagggggtgtgtggaggtggcctgtccctatgagaaggggagtttaaaactattacaggctgggcactgtggctcacgcctgtaatcccagtactttgggagacagagacgggtggatcacttgaggtcaggagttcgacaccagcctggccatgacagcgaaaccccagctctactaaaaatacaaaaattagccaggcgctgtggcacgcgcctatagtcccagctacttgggaggctgaggcaggagaatcccttgaacctgggagagggaagttgcagtgagctgcaatggcgccactgcagtccagcctgagcgacagagtctcgctctgtcaaaaaaaaagaaaaaaaaagaaagaaagaaagaaaagaaaaagacatttgaattctagtatctgtcagttcctctgagccaactggaaaatagatgcctttcaccttgaagtttgtttttgcttgtttgtttttttgagacagagtctcgctctgttactatactggagggcagtggcctgatctcagctcactgcaacctctgcctccttcaagcgattctcctgcatcagcatcagcctccctagtagctgggactacatgcgcacgccaccacacccggctaatttttgtaattttagtagagatggggtttcaccatgttggccagtatggtctctatttctagacctcaagacccgcccgccacagcctcccaaagtgctggaattacaggcgtgagccaccaggcctggccaccttgaagttttaagtgacaaccaaggatagccaccagtgtcttggttatggaagcctcctacgtgcttcccgcccccagtttgatttgcaggctcctggttgtgttgcagtaaacacgctttcctctggccttgtccaatgaatacggttcacacagctaacagtacttcttgagaggggttaccatgtaaagctgagaataaactgggtttaggtaacgttgtgcctccttatcacctgagaggccattgttcctggttcattctgtaagtgtattagtgctgtcagacatctttggacaattcaaatgaaaaggggctgtggttttataaaggaaacaaatgctttagatgtgaaatccttcttttattctccacttctcttacgtgaaaatttttgttttatttatttatttttgagacagtgtctccctctgtcatccaggctggagtgcaatggtgcgatcttggctcactgcaacttctgcctcccgggttcaagcgattctcctgcctcagcctcccgagcagttgggattacaggagcccaccaccacgcccggctagtttttgtatttttactagagacggggtttcgccatgttggtcaggagggtgtcgaactcctgacctcaggtgatccgcccgcctctgcctctcaaagtgctgggatcacaggcgtgagccaccgccccccgacgcctcagctcatttgttaattagcagtaattgcccgggtcagtgacacctcctacttgagcctctttccctgtccataaaatgcactaatactggggtgggtgggattgggaggtgggtcctggagctccatccaatcagtggcactggtgtaggaaccgcccgatcaggcgcgcagttggagaggagggcgtggcttccggcatttggcggggtctttgtctctcgctcccgccagagcttgggatcggtcttcactgttccgcgtcctctacctgggaaccaccgacccccgcccggcgactttgtcacagactctgttgccctgtgatctgcaggtcctgggagacgcacagccaagatgccagggcaccctggaagctgtgaagtggtgcgtatgcggggttgggcatcccttgaggcgagagcgggctgtgaaacctgcaggaccggcctccccacagtccgctcccgggtccgccgacctcagtcctctctggcgcagctcggccccaggcgtctctggccgcaagatggcggctgggcccgcggccgggacccccagcgtctcgccgcgtccctgctgggcgccctgtctggacctccctgggcagctctgcgcccgcagccccgagtatttcccagagtgcttagggatgccaggcgggtcatcagggtagaatcccgactaggtgtgtgcgtgggaggagctgcgacccgtggggttcccaagctttcctgttattttttttttcttttctttttagacagtctcgctctgtcgctaaggtaaagtgcagtggtgtgacctcggtttctgtaagctccgtctcccagggtcaagcctcccaaagtgccgggattacagggttgagccaccgcgcctggcctaatatattaatttataagaaatgcattcgagttgggttttagattttttaaatttatgaacacaggggactagagccactttagtctaatttcctgctgtttaattattttaacactccacagaggactcgttttcctctgtgccttcctaatgtgtggcaagcagggctctaatccacttttttcccttagcctaactcaggcttgcagtaaaattataaatttccacttttgttcctacattctcaaatgtgggatatgagaccaacttcccctgtccagtttacgacactatcaactatttgtcctttattgtacattagagacacggtattttaattgttaatcatgattttacacagcagtggatggtggcaggtttttaaagatttgttttctgtctataaacatttcacatgagaaaaatgtagaaaataatcctctgtcactccactgtaaaaaataaaaataaaaattatctctgcctctcccacttttatcttccctaggtacacacaccttattagtacgtcttcgggttgaagttttgctttggagaaattacagggccctttacagcagccctctggtcttttcttggtcatgagtttcagaactgtcttaaccaacccaggatgcccgtagtgaccatatctcttggagtgtctaatgaatatcatcccctgggtcatttcttagagggcagcctgaggaatgggagtatagcctctcagaggagcaactgggtggtctgggcctgaggacagtctcctggtataccatttgtctaaaaagctacctcttagaacattaagatttttttggtcaaaggaatgcttaggcaccactggtgggagtttaaatcagttcacctattgtcgacagtgtggccattcctcagagacctagagaaagcaataccattcaacctagcaatccagttattgggtatatacccaaaataatataaatcattctactataaagacacgtgcatgtgtatattcattgcagcacaattcacaatagcaaagacatggagtcaagctgaatgcctatcaatgatagactcaataaagaaaatgtggtacatatacaccatgggatattgtgcagctataaaaaaaatgagatcatgtctttcggaggaatgtggatggagctgtaggctgttatccttagcaaagtaacacaggaacagaaaactaaataccacatattctcactttaaagtgaaagttgaatgatgggaacacatggacacagaggggaacaatccatactggggtctattggaaggaggagggagaggaacaaaaaaagtaattaatgggtactaggtttcatacctgggtgatgaaataatcttcacaacaaacccccataacacacctatgtaaaaaatgtgcataggtaaaaatgtgtctcaaactcctgacctcaggtgatctgcccgccttggcctcccaatgtgctgggattacaggtgtaggttttttaaaaatttaggtagcttttcccataattccctaagagctttttttttttttttttttttttttttttttgagatggcgtttcactctgtcacccaggctggagtgcagtagcagtgtcttggctcactgcaacctccaactcctgggttaaagcaatcctcctgccttagcctcccgagtagctgggattataggcatgtgccagccaacacacccggctaatttttgtatttttagtagagatagggcttcatcatgttggccaggctggtcttgaactcctgatgtcaagtgatctgaccgcctcagcctcccaaagtgctggggttacaggcgtgaggcaccacgcccagtctgtgtggggaaaagagagatcagactgttactgtgtctgtgtagaaagaagtaggcataagagactccattttgctctgtactaagaaaaattcttctgccttgagatgctattaatctgtaaccctacccccaaccctgtgctcacagagacaagtgctgtgttaactcaaggtttaatggatttagggctatgcaggatgtgctttgttaaacaagtgcttaaaggcagtatgcttgttaaagtcatcaccagtctctaatctcaagtacccagggacacaatacactgctgaaggccgcagggacctctgcctaggaaagccaggtattgtccaaggtttttccccatgtgatagtctgagatatggcctcatgggaagggaaagacctgaccgtcccccagcctgacatgggtaaagggtctgtcctgaggaggattagtaaaagaggaagacctctttgcagttgagataagaggaaggcatctgtctccaggcatgtgtctttatagtagaatatagtagaatgatttatattattcccggagagtgatttatattattccctgggcaatggaatgtctcggtgtaaaacccgattgtatgttccatatactgagataggagaaaactgccttaaggctgcaggtgagacatgctggcggcactactctttaatgcaccagagatgtttatgtatgtgcacatcaaagtacagcaccttttctaaccttgtttatgacacagagatatttgttcacgtgttttcctgctgaccctctccccactattaccctattgtcctggaacatccccctctcttgagatggtagagataatgatcaataaatactgagggaactcagagaccggtgctggcacgggtcctccacatgctgagcgccgcccctgggcccacttttctttctctatactttgtctctgtgtctctttcttttctcagtctctcgtcccacccgacgagaaacacccacaggtgtggaggggcaggccaccccttcagtctgaagaataattttccactctgtgcaatttaagacaattatcttttttttttttgaaatggagttttgctcttgtgcccagactggagtgcagtggcacaatctcggctcactgcaacgtccatctcctgggttcaagcgattctcctgcctcagcctcctgagtagctgggattacaggcatgtgccatcatgcctggctaatttctgtatttttagtagagatggggatttcaccacgttggccaggctgatctcgaactcctgacctcaggtgatctgccctcctcagcctcccaaagtgctgggattacaggcgtgagccactgtacccggccctatctatgtatttttaatcaatgttgtccctgctttgtttatgacacaattttttctaggttttcaataaggcagagttttgctcttgttgcccagggtagagcgcagcggtgcgaccttggctcactgcaacctctgcctcccaggttcaagtgattctcctgcctcagccccctcagtagctaggattacaggcatgcgccaccacgcccagcttattttgtatttttagtgaagatgagggtttctccacgttggtcaggctggtctccaactcccgacctcaggtgatccgcccgccttggcctcccagagtgctggaattacagccatagccaccgcgcccggcctattgctttattttgtcttggtgagtagtcaaggaaataatcttaaattcacaatctacttatagtttgaatatatataattttgtgagaagaacacttgttatttgaaggtaatttttaaaaaattttgtaactttttaggtattcttaaattttaaattgtggttaaaaacatgcaatagtcatttcagacattattaggtgtacagtttagaagtattaagtgcagtcctgttgttttccaggaggttagagatgatttttgtcttacaaaagtaaaagcaaatactcactaaacaacaaattgtcctttccacctctctctagctcctgaagaaccccattttactttcttttttcatgactttgactaagtattctatgtaagtgtgattatacagtgtctctttttttgactattttattttacttgacatagtatcgtaaagatttatcattattgtagtatttgtcaagatgtccctattttatttatttatttatttggagtcgaactcttgctgtatctcccaggctggagtgcagtggcgccatcttggctaactgcaacctctgcttcctgggttcaagcaattctcctgcctcagcctcctgagtagctgggattacaggcacgcgccaccatgcccagctaatttttgtatttttagtagagacagagtttcaccatgttggtcaggctgagatgaccctatttcaaaagactgaataatatcctgttgtatatatgtgccgcattcgtttaatctactcatttgtaaagggacatttgcttccaggtattatcttttgtgagtcatactgcaatgtacatgaatgtacaaatatctgttccatgttttgccttgactatgggatattttgaatccactgatttagtgtcatgtatatactcttatttttttttttttattttgagacagagtctcactctgccacccaggctggagtgcagtggcgtgatctcggctcactgcaacctttgcctcccgacttcaagtgattctctacctcagccttctgagtagctgggattataggtgcgcaccaccatgcctggctaagttttttatttttagtagagacggggtttcagcatgttgcccaggctggtctcaaattcctggcctcaagtgatccacctgcctcggcctcccaaagtgctgggattacagacgtgaaccactgtgcctggctatgctcttacttttattgcctgatctcttgatgttgtgttccccaaatcattgccaaacccattgtcatgaagcttcccccttctgtattgttctaggagttttacagttatagattttatgttaaagccttagttcatttctttttttctgttttgtttcttttttcttttcttttttttttttttttgagatggagtcttgctctgtcgcccaggctagagtgcagtggcacaatctcggtttactgcaatctctgcctcccaggttctagcgattctcctgcctctgcctcccaagtagctgggattacaggtgcacgccaccactcctggctaagttttgaatttttcgtagatacagtgtttcgccatgttggccagactgctctcgaactcccgacctcaggtgatccagccgcctctgcctcccaaagtgctgggattacaggcgtgagccaccatactagacctctttttttctttttttttttgagggtctcactttgttgcagaggctggagggcagtagtgtgatctcggcttgctgcaaactctgcctcctgggttcaagtgattctcgtgcctgaacctcctgagcagcttggattacaggcatttgccaccactcccagctaatttttgttttttgtttttctttttttgagatgtagtctctctcagtcgcccaggctggagtgcaatggtgctatcttagcttactgcaacctccgcctcccgggttcaagcgattctcctgcctcagccttctgagtagctgggattacaggcgtgagccaccacgcccacctgatctttgtagttttagtagagatggggtttcaccatgttggccaggctggtctcaaattcctgaccccaggtgatccacccgcctcggcttctcaaagtgctgggactacaggtgtgagccactgcacctggctaatttttgtattttcagtggagatgggattttgccatgttggccagactggacttgaatttctgggttcaagtgattcacccacctcggcctcccaaagtgctgggatttcagtcttgagccaacacacccagccttatcttttatttatttgtttatagacagactcttgttctgtcacccagactggagtgcagtggagcaatgatagctcactgtaaccccaaactcgcagactatctttccacctcagcttccctagtagctggggctacaaaaatatgccaccatgccatgtctatttattttttgtagagatgaggtctcatgttgttcaggctggtcttgaacttctgacttcaagtaattctcttgtctcagtctttcacactgtaggaattacagtcatgtgccaccacacctggactttgctaactattttgtaatatgcaacacttttttattcatcattgtcatcctactgtgtaatagaaaaccagaacttactcttcttctttaattgtaacttaatatttgttaagtaacctcttcccatcctcccactttagtctctggtgacacctgttgtattctttgcttctataaaccctttttttcagagtcctcgtatgagtaaaattatgagatcatgaagtatttgtctttctgtgtatgacatttcacttaacatgatatcctcttggtccacccatgttgttgcaaatagcagaattttttttttttttgagatggagtcttgctctgttgcccaggctggagtgcaatggtacgatcttggctcactgcaacctctgcctcccaggttcaagcaattctcctgcctcagcctcccgagtagctaggattacaggcgcccgcctccatgcccagctaattttttgtatttcagtagagacagggtttcaccatgttgcccaggctggttgcaaacttctgagctcaggcagtccacccgcctcagcctcccaaagtgttgggattacaggcgtgagccacagcgcctggcataattttttttaatagctaagtagtattgtattgtgtatgtataccacattttcttttttcattttttttttgagacaaaatctcgctcttgttacccaggctggagtgcaatggcgtgatctcggctcaccgcaatctctgcctcttgggttcaggtgattctcctgcatcagcttcccaagtagccgggattacaggcatgtgccaccatgcccaactaattttgtgtttttaggggacggggtttctgcacgttggtcaggctggtctcgaactcctgacgtcaggtcatctgcccacctcaggcttcgaaagtgctgggattacaggtgtgagccaccggacccggccttttttctttattcatttatctgttgctatacatttgaattgattctgtatcttagcttttataaatagtgctgcaataaacacgggaatgcagatatctttttgaaatatggattttcttttttttagatatataggcagtagtggctgagcccggtggctcacatctgtaattccagcactttgggaggctgaggccggctgatcacgaggtcaggagttcgagaccagcccagccaatacggtgacaacctgcctctactgaaaatacaaaaattagccaggcatggtggcacatgcctgtagtcccagctactcgggaggctgaggcaggagaaccgcttgaaccggggagggggaggttgcagtgagccgagattgtgccacttcactccagcctgagggacacagcgagactccatctcaaagaaagaaagaagatacatacccagtagtaacattactgggtcatatagtagctctatttttaattattcgaggaacctccatactattttctataatggacataaatatttacactcccgccaacagtgtgtatgtgtttcctctttattacatcctcattagtgcttgtttttttttttttaagtatagccattctaatagcgttaggttgtatattattgtagtttgggtttgcatttacctggtgattagtttatgttgagcatctttttatgtacctgttagccattcatatgtttttttgataatacctgttaagatctacatatttttaatagattgtgttttattttagaatttcacagtttttaaaataattttgaatattaattccttgtcatatgtatagtttgtacattattttccttcattttttagattgcctcttcaccctcatagttgtttccttttatatgcaaaagcattttagcttgatgtaatctcattagctcatttttgcttttgtttcctatgcttttgaagtcttattttaaaaaattatttcccagtctaatgttttaaaacattttttctatgtttctgtttaatagtttcatagtttgtggtattacatttgagtctttaattcatcttgagttgatttttgtatataatgaggggtagggatctggttatattattctgtgtatggatatttgattttccctgccatttgttgaagagattgtcttttccccaaagtgtgttctcaataccattgttaaaaactagttggctttaggtgcatagatttgtttctgagcttattgggcacattgatctatgtgtttgtttttatgtgagtacaatgctgttttggttataatagccatgtagcaaattttgaagtcagatattgtgatgccttcagctttgcgcttttaaaaaaaatgtataaaaagtatttcctagacaagtggcagattacattttagaaacaaaaccatctttgaaaatactggccgattcttctttaaaacgtacaaataggtcttttaaaaaaacttaagttcaggggtacaagtgtacgtttgttgcactggtaaacatgtgtcatatgggtttgttgtaaagattaagcctaagtacccattagttatttttcctgatccttttcctcctccaaccttccaccctctgaaaggccccagtgtgtgctgttcccctctgtgtgtccatgtgttctcattatttacctcccacttataaatgagaacatgcagtatttggttttctattcctgtgttagtttgctagggataatggcctccagctctgtccacatgcctgcaaaggacatgatctcattcttttttatggctgcatagtatttcatggtgtatatgtaccacatttttctttatccagtctatcattaatggacatttcagttgatttcatgtctttgctatggtgaatagtgctgcagtgaacatacacgtgaatgtgtgtttataatagaagaatttatattcttttagctatatacccagtaatgaaattactggtcaaatgttatttctgtctttaggtctttaaaaaatcaccacactgtcttcaaccttagctgaacaaatttacactcccaccaacagagtataagcatttcttttcctccacaacctcgtcagcatctgttattattttgcttttttaaaatagccattctgactaaggtgagatggtatctcattgtggttttgatttgcatttctctaatcggtgatgttgagctttctttcagatgattttgatcacacataagtcttctttttaaaggctcatgtccttttaaaggttcgtgtcctttacccacctttgtttgttttttttctttttaaaggatcatgtcctttacccatctttttttgctttttttctttttttttaagtagagacagggtttcaccatgttggtcaggctgttctcgaactcctgacctcaaatgatccgccctcctcagcctcccaaagtgctgggattacaggcatgagccaccatgcccgtctttttttttttttttttttttttttttttttaaatatagacagagtcttgctctgtcaccgaggctggagtgcggtggcatgatcttggctgcaacttccacctcccagattgaagcgattctcctgcctctgcctctctagtagatgggattacaggctcccaccaccaagtttggctaattatttttttgtatttttagtagagatagggtttcaccatgttgaccaggctagtctcgaactgctgacctcaggtggtccacccgcctttgtctccaaaagtgatgattactgatgtgagccaccgcacccagacctatttcacccaatttttttttctttttttttttttttttttttttttttgagatggagtctcgctctgtcacccaggctggagtgcggtggcacgatctcggctcactgcagcctccgcctcccaggttcaagcaattctctgcttcagcctcctgagtagttgggattacaggcgcctgccaccatgtccagctaatttttgtatttttaatagagacggggtttcaccgtcgtggccaggctggtctggaattcctgacctcatgatccacccgccttggcctcccaaagtgctgtgattacaggcgtgagccgccttgcccggccccacccaatttttaatggagttgtttatgtcttgtaaatttgtttcttctagctgctggatattagacctttgacggatgcatagtttgcaaaaattttctcccataccgtaggttctgtttactctgttcatagtttcttttgctttgcagaagctctttagtttaattagattttacttatttatttatttattgtgattgctttggcatctttgtaatgaagtctttgcctgtgcctatgtcctgaatcatgttacctaggttgtctttcagggtttttatagttttgggtttttcatttaagtttgtaatccatcttgagttagtttttgtatagggtgtaaggaaaggatcaagttttaattttctgcaaatggctagccagtttatttattgaagagaaaattctttgctcattgcttttgtcagctttgtcaaaggtcagatggttgtaggtgtgcagcttaatttctggccctctattctgttccattggtctgtttctgttcttgtaccagtaccatgctgttttagtttctggagccctgtagtatagttgaaagtcgggtagtgtgatgcctccagctttgctattatttgtgtttaggattgtcatgcctattcagggtgttttttggaaagtttcatatgaattttaaaataatttttttctaattctgtgagaatgtcaatgcttgtttaatgggaaaagcatcgaatctataaattgctttgggcagtatggccattttagtgatatggattcttattattcataagcatggaaagtttttccatttgtgtcatttctgatacctttgagcagtggtttgtagttctccttgtagagatctttcacctcccttgttagctgtattcctaggcattttatcttttttgtggcaactgtgaatgtgagtttgttcgtgatttggctctcagcttgactgtcattaatgtaaaaaaatgctagtaatttttggctgggtgcagtggctcatgcctataatcccagcactttgggaggcccaggcagttggatcacctgagatcaggtgttcgagaccagcctggccaacatggtgaaatcttgtctctactaaaattacaaaaattagccaggcatggtggcgggtgcctgtaatcccaggtactcagaaggctgaagcaggagaattgcttgaacccgggaggcagaggttgcagtgagtcgagatcgcaccactgcactccagcctgggagacagagcaagattccgtctcaaagaaaaaaaagaaaaaaagaaatgctagtaatttttgcacattgattttgtattctgagagtttgccaaagttgtttatcagcttaaggagcttatgggctgagattatggcatattctcgatataagattatgttatctgcaaacaggaatagtttgatttcctctttttctatttgaatgccctttatttttcttgtcttttcttgctttttttttttttttgagacggagtttgctcttgttgctcaggctggagtgcaatggcatgatcttggctcactgcagcctccacctctgaggctcaagcaattctcctgcctcagcctcccaagtagctgggattacaggcatgcgccaccacgcctggctaattttgtatttttagtagagacaggtttcttcatcttggtcaggctggtttcgaactcccaacctgaggtgatccaccacctcggcctcccaaagtgctgggattacaggtgtgagccaccacactcagcctagatgccctttatttctttctcttttcttgttacccggaccagaagttccaatattatgttgaataggagtgatgaaagagggcatccttgtctagttttagtttttgtttgtttggttttttgagagggagtctcaccctatcacccaggctggagtgcagtggtgcgatcttggctcactggaacctccgcctcccgggttcaagcaattctccctgcctcagcctcccgagcagctgggattacaggtgcccaccaccacgcctggctaatttttgtatttttagtagagatgtggtttcaccatgttggccaggctggtcttgaacacctgacctcaggtgatctgcccgccttggcctcccaaagtggtgggattacaggtgtgagccacgcacccagcctagttttagttttcaacgagaatgtttccagtttttgcccattcagtataatgttggctgtgggtttgtcatagatgtcttttagtattttgagatatattttttcaataccttgtttattgagaggggtttttttgtttgtttgttttttgtttttctccagatggtgtctcactctgtctctccagcacctaggctggagtgcaatggcatgatctcagtgcagcctccacctactgggctcaagagattctcccacctcagcctcccgagtagctgggactacaggcgtgtgctaccacgcctggctaattttttgtatttttagtagagatgggttttcaccatgttggccaggctggtcttgaactcctgacctcaagtgatctgcctacctcagcttcccaaagtgctgggattacaggtgtgagccaccatgcccagcgtattgagagtttttaacatgaatggatgttgaagtgtattgaaagttttttatgcatctattgaaatgatcatgtggttttgttcctttttgtttgttggttggttggtgggttggttggtttttgagatggagtttctctcttgttgcccaggctggagtgcagtggtgcgatctcggctcaccacaacctccacctcccgggttcaagtgattcttcttcctcagcctctcgagtagctgggattacaggcatgtgccaccttgcctggctaattttgtatttttagtagagagggggtttctccatgttggtcaggctggtctcgaactctcgacctcaggcgatccacctggctcgacctcccaagtgttgggcttacaggcgtgagccaccgcgcctggctgattatgtggtttttgtctttagttctgttatatgatgcatcgtatttcttttttcctatttatttttttctgtctcccaggctggagtgtagtggtgtgatctcggcttctggcaacctttgtctcctaggttcaagcaattctcctgcctcagtcccaagtagctgggactacaggtgggcgcctccatgccctgctaatttttgtatttttagtagagacagtgatattgtttgattgagtctccattcagatctcaatttgaattgtgtttcccagaattcccatgtgttatgggagggaccggggggagattattgaatcgtggggtctgtttttttcctgtagtattctcgtgatattgaataagtctcacaagatatgatgggtttattagtggtttctgctttgcttctttctcattttctcttgctgctgtgatgtaagaagtgccttttggctactgccatgtttctgatgcctccccagccatgtggaattgtaagtccaattaaaccgctttttcttccccgtcctggttatgtctttatcagcagtgtgaaaacagactaatacagtaaattggtaccagtagactggggccttgctgaaaaaaaataaccgaaaatgtggaagcgattttggaactgagtaacaggcaaaggttggaacagtttggagggctcagaagaagacaggaaaatgtgggaaagtttggaacctcctaaaaatgtattgaatggctttgaaaaaaatgctgatagtgatatgaacaataagattccagctgagagggctgggcacagtggctcatgcctgtaatcccagcactttgagaggctgaggagggcagaccacgaggtcaagagatcaagactatcctggccaacatggtgaaaccctgtctctactaaaaatacaaaaatcagctgggtgtggtggcgcatgcctgtagtcccagccacttgggaggccgaggcaggagaattgtttgaacccgagaggcggaggttgctgtgagccaagattgtaccactgtactctagcctggcaacaaaatgagactccatctcaaagaaaaaaaaaaaaatcccagctgaggtggtctcagatggagatgagaaacttggaaccgaagcaaaggtgagccttatgttttagcaaagtgactggtggcattttgccctgccctagagatttgtggaactttgagcttgagagagatgatttaaggtatctggtggaagaaatttctaagcagaaaagcattcaagaggtgacttgggtacttttaaaagcactctgttttaaaagggaaacagaacataaaagttcagaaaatttgcagcctgatgatgcaatagaaaagaaaaccccattttttgaggagaaattcaagctggctacagaaatttgcataagtagcaaggagcctaatgttaatccccaagaccatggggaaaacatctctaggccatgtcagagattttcacagcagctcctcccatcacaggcccagaggcccaggaagaaaaagtggttttgctaggcatggtggctcatgcctgtaatcccagcactttgggaggctgaggtgggtggatcacctgaagtcaggagtttgagaccagcctggccaatatggtgaaaccccatctctactaaaaatacaaaaactagccaggcatggtggcaggtgcctgtaatttcagctactcaggaggctgaggcaggagaattacttgaacccaggaggcggtggaggttgcagtgagccaagatcatgccattgcactccatcctgggtgacaagagcaagacttcgtctcaaaaaaaaaaaaaagaaaaagaaaaagtggttttgtggcccggggcccagggtccccatgctgtgtgcagcctaaggacttggtgtcctgtgtcccagctactctagccatggctgaaaggggccaatgtacagctttggctgtggcttcagagggtggaagcctcaagccttggtagcttccatgtggtgttgaggctgtgggtgcacagaagtcaagaattgaggtttaggaacctccacctagatttcagaaaatgtatggcaacacgtggatatccgggcagaagtttgctgcaggggtggagccctcatggagaacctctgctagggcagtgtggaagggaaatgtggggtcagagcccccacacagtccctactggggtacagcctagtggagctgtgagaagaaggccaccatccgccagaccccagaatggtagattcacccacagcttgcactgtgcacctggaaaagctgcagacactcaatgccagccagtgaaagcaactgggagggaagctgttccctgcaaagccacaggggtggagctgttccggatcatgggaacccaccttttgcatcagcgtgacctggatctgagacttggagtcaaaggagatcattttggagctttaaaatttgactgcctcgctggattttggacttgcatggtccctgtaacccctttattttgtccaatttatctcatttggaatggctatatttacccaatgcctgtacccctattgtatctaggaagtaactagcttgcttttgattttacagactcataggcagaagggacttgccttgtctcagatgagactttggactgtggacttttgggttaatgctgaaatgagttaagactttggggatctgttggggaagcatgattggatttgaaatgtgaggacatgagatttggaggggccaggggcagaatgatattctttggatgtgtccccattcaaatctcaacttgagttgtgtatcccagaagtcccgtgttttgtgggagtgacccaggggaatgtaattgaatcatgagggctgttctttcccatgctattctcgtgatagtgaatatctctctcaagatctgatgggcttatcaggggtttccagttttgcttctttctcattttctcttgctgctgtgatataagaagggccttttgcctcccaccatgattctgatgcctccctagccatgtggaactgtaagtccaattaaacctttttcttctcagtctcaggtatgtctttatcaacagcatgaaaacagattaatataaatggggttggtggccaggtgctgtggctcttgcctgtaatcccagcactttgggaggccgaggcaggcgaatcacctgaggttgggagttcgagaccagcctgatgaacatggagaagccccatctctcttaaaaaaattagctgggcatggtggtgcatgcctataatcccagctacttgggaggctgaaacaggagaatcacttgaacccaggaggcagaggttgcggtgagccaagattgcaccattgcactccagcctgggcaagagcaaaactccatctcaaaaaaataaaaataaaaaacagatggggtttcaccatgttggccaggctggtctcaaactcctgacttcagatgatccgcccacctcggcctcccaaagtgctgggattgcatgtgtgagccaccacagctggcctgaataatatttcttaatttcagtatgttcaaccaaccttgcatttcagagatgaagcctacctgattctggtggataagttttttcatttgctgctgaatttggtttgccagtattttgttgaaattttttgcatcactgttcatcaaagatacttacctgaagctttctttttttgttgtactctgttgggttttggtgtgaagattgtcctggcctcatagaatgagttagggagaagtcccttctcctcaattgtttttttgtttttgtttttgtttttttgagacaaaacaaaactcttgtcacccaggctggagtggaatggtgtgatttcagctcactgtaacctccgcctcccgggttcaagtgattcttctgcctcagcctcttacaggcacacgccactaggcccagctaattttgtatttttagtagatacaggacttcgccctgttagccaggctgttctcgaactcctgatctcaggtgatccactcgccttggcctcccaaagtgctaggattacaggcatgagccactgcgcccagcctgtcgttaattttttgaaagaatttcagtagaaactgtaccagctcttctttttacatctggtggaattcaactgtgaatctttcttcccatggggactcagggaccatcctgtgtcatcttctgagggcccggaaggggtttgcctgtgggctttctaattgccggaagggacggcatgctgcatggtgggtgcccctgctgtgggttagggggtacccctgcttggcatcccgcccctctggttcctgcttccccccctcattcttgggggtgggggtggtggcagcttgatccccgggctgggacagggctgggggagcctggtgtggatggctgaggcactggtgtctggggatgtggcccagcaggctccatcccaggtaaggccctgagggcccagaggtagccgtcttggtcccagccctctcccaccccaggggtagggtggtcactaaggggcagtccctgcacttgagcccttcctcctctttccaccacctacggttgatcaacagacggggtcaggggcatggtgggaaggaaggttggcaacttagataccagaggaacagcttcaggccacgagcgcctcccttggcctgtagggtggacccgctgtgcctctgccagttggcttttccttctgtctgccaggtccaccagatgtttgccaagagtgtaggacttggccaccagcttgaagtgtttcaggtggaccagagggctctcgccggggtcagaactgcttagatccagcagagggtgcgattgtggctcactgctacctccatcttcccaggcttaccgaggcgatcctcccattttggtctcccaagtggctgcggctctggggatctttctgttttgttttgttttgtttttttccctaggcccacttcaagtttgtttccacagtacattgaattgctgttttttttttctttcttttctctctgttatgctccttcctgcatactgaagttcctgttattttagattttttcttttcttttttttttttaaatcaggctttggctcccaaagtgctggaattacaggtgtgagccaccatgcctggctctatctatctatctatctatctatctatctatctgtctatctgtctatctatctgtgggcactctatagataggtaggtaggtaggtggtaggtaggtaggtagaaaataaataagttttcatttatttatttatttattttgagatggaatttcactcttgtcacccaggctgggcaccatctccagtcactgcaaccaccgcttcctgggttcaagcaattctccatcctcagcctcccaagtatctgggattacaggcgtgtgccaccacacccagctaacttttgtatttttagtagaaatggggtttcaacatgttgaccaggctgatctcgaactcctgacctcaggtgatccacccacctcggcctcccagagtgctgggattacagtcgtgagccaaggagcccggcctatctatttttttagtagagatgtggtctcactatgttgtccaggctttggttatatatattactcttttaactttgtcatttttcattagagatgtctcacaatgttgcccccagtatcgtatcaaactccttggctccatctatcctcccgatttggcctcccaaagtgctgggattacaggcatgagccaccgtgcctcatctggttatatttttgatgtgttgactctttccagttcagatgcataatctcatccctgaacatcctgctggtgcgattatgacatatgattttacccagcaccagagggatttgatgctcctgcctgggcccaactcacagaagggattgtgacatatcactggacccagcactgaggtaatgtgactatcttactgccttgacactgcccacagaggacatagtgacatatcactgggtcttgtacccaggtggtgtgaatcttctgccttggttcttccacaggggacattgtgtaatatcgttgggcctcacacgtacgttatgtgactctcctgcgtgtgccctgtccatgtgggccattgtgacatattgctgggtccaacaactggttgatgtagctctactgcctaggtcctgcctatggaggactttgtgatgtatccctgaacccatcacacaggtaatgcaactctattctcctacctggccccttctcacagaagagattgtaacatatcactgggctaagcacctagctcacatgactctccccctctttctagattctgccctcagaggacattgtgacatgtcactgggcctaatactaagatgacatcattctttagttttggcactgccctcagaagccgtggtggtgtattgctgggcccagagccaatgtgatgtgagtctcctgcctggatcctgcctacaaggtgcattgtgacatacctctgggccctttgactattttatgtgactctcctctcttacctggatgttgcccaaaaagagattgtgacatactttgcacccagcactgaggtgatttgactgtcctcttctgcctgtgctttgcctacaggagagagagtgacttattactgagtttagcatacacatgatgtgattttcctccactcacagaagtcattgtgacatatatcttggcccatcactgagattgtgactgtctttttcctgggacctgtccacagtggagagtatgacactttttggccaagcacctacaagatacgactctcttcttacacctgggccactggggtgattttgacatgtagttggccccagctccaagattatgtgactccacacttcttcctgagccctacctacaggtagcattgtgtcatatctgtgagaccctcaattaggtgaaatgactctttgtttgggccctcttctcaaggtaccgtgacattgctgggcccagcatctaggtgatgtaactctactgtactgtttggtttctgcctaaaaagggattgtgacataccactctatcaagaacctaggtgaggtgactcctctccagcctgggacctgcatacattgcttattgacacatatcactggctccagcacctaggtaatgcaactctcctacatgggcccccacccataggggtattataagatatctttctattaatcacctaggtggtgtgacactcctcttctgcctgggccctcccaaaaaagtattgttacacatcactgagcccagcacctaggtgatgtgactcttctctcatgcatcggccctgccaactggggtgtttgttacatatagctgggcgcagcccctaggtcatgcgattcttttttttctgagccctacccacagaaggcattttgacatattttgagcccatcatttaggtgatgtgacccttttgcatgggccctccccacaaggggtactgtgacatattgctgaacccagtacataggtgatgtgactctgctctatggattgggctttggccaagcagggctgtgatgtgttgctggactcaccacctatgtattgtgattattctgttctgcctaagccctgcgtacagtgtgtattgtgacatatgcctggatttagcacctaggaaatgtgactttatggcatgggaactgtccacaaaagtgttatgacatctttttcatcacctaggtgatatgacccttttattttcccggttctggcatattctgggtatagtaacatatcattgagtccaatgcctatgggatatgtggctcctccctgggcccagcacatagagtgcctcattgacatatctctgcatccatagtctaggagatttaactcttctcctgactttcttctcctgcctagtttcttcacacaaaaagtattgtcacatatcactgggcccaacagcaacagtaacaatgatgttactctttggcctactgtttgccctcagaaggcattgtgacacattacttggccaacatcaaggtcatgtgcttctcctgcctggacgctgtcacaggggacattgtgacatatctctgtgtccatcacccaggtgaggtgaatcttttcacctgcctggtgtctgcttgctgggggataatgatatatattgctgatttcataccgagctgatgtaactcttctcgtcttcatacatcctgcccggaagaaaactgaaatattgctgggcccaacaccaaggttatttggcctggccccgccttcaaaaggcattgtgacatattgcagtgcccagcaccaatgtaatttgtctcctgcctacaccctgcctacttggggcattgtgacatgtcttggcccatcaactatttgataaagctctcctttcttacctgggtttttcccatagtagagattgtgaaagatctctgggaccagcacctagattatgtgactctcttcttttgcctgggccctttccacggggatgattgtgtcatatagttttacccagcccctaggttatggtttctgtgacatattgcttgactcagcacataggtgatatgactcttctccaccgcttggactctgtcaaggaggtattgtgggccaggtgtggtggctcatgcctgtaatttcagcactttgggaggtcaaggcaggtgggtcacctgaggtctggagtctaagaccagcctggccaacatggcaaaacgctgtctctaccaaaaatacaaagaaaaaaatagccgggtatgatagtgtgcccctgtagtcctggctacttgggaggctgagacaggagaatcacttgaacccaagaagtggaggttgtggtgagccaagatcattccattgcacttcagcctgggtgacagagtgagactctgtctcaagaaaaaaaaaaaaagaaggtattgcaatgtatcactgggactgacacctaggttatgatactctctcctgcctgagccctgcataaattgtatattttgacatagcactgcattcaacatatagctgatgcaactctagcacataggccctgctcatgggcatattaggacatatatttttcttcatcacctaggttatgtgaatcctcttcttcccagatcctgccaaaaggaaagattgtgacatatcactggaaccagcacttaggtaatgtgacttttctgctctgcctgagaaccacatttttggtattgtgacatttcactgtgccaaacacctaaacgatgggaggccctgcctcagccctgtccacaggggttcttgtgacatatatctgcatctattacataaaaaatgtgactccatttctacctgtcccctgcttacaggaaagattgtgacatagtgcagggtccagccaccaggtgatgtgtctctcctacgtgtgcattatttttaggaagaaatggtaacataccattggttgagaactcaggtgatatgactctcctgcctgatcagtgccgtcagggaaaattttacatatcatttgcccagcatccaggtgatgtgacggttctgggtactttctgtcaacaagtaggttggtaacgtatagcttagcccagctcacaggtgtgatgatgactctaatactttgtaccagccaatagaagagatactgtctctcacagctaggcttagaaaaaggggtaaaatcctgggtctcctctctgtatgaaggttatagagaattaatactctcgcatattgtataaagccctcagatggtacagagagtgtcgtcataggaaaaagcaaacagattagatcatgtttcttgtaagcacactgtcaatttttagaattaccactatcacacagggacagaacccacggaggagttcatgattctcatgtgcagatgcagtccatagttaaaattgtgatatcatatgtgaacatctggccacagttgagatggtgactcatttctaaacccaggtcataggcaggtgaggactgtcctctgtggacccagccattcggagaatgttgactctcatacctagacttagagccgcataagatcataggtccatagcaccacaaaaatctcagagcagattgtgactcatgcataccatataaagccctcaaatggtacagagagtgtcttgacagggccaagcacagaggtgagattgtgaccctcatattcacaaccagtcaacagtagagattgtcatctgcttaaataaacacaacccacttctgaggttctgaatctcacattgggaggcagttgaatgttggaaaatggactctgtttgtggattctgtccacagttgggttgatgactctttaaccaaaattcagcacacctttgtggctgtcacttcactaaggcacagggtttacaagagaaattgaggctctcatacacaaatccattccaccattgagattgtgacttcttgtacttagacccaacttgcaggagatgttgactctcattccttgactcaagaccttgtcatttttaatgtcaccaaaagaccttcttataggtgtgattgtgacatgtgcctctgcccaacgtctgagttatttgactctcacctgggcccagtacccagtgacatattaggggacccagacctttggtaatgtcactctgttctgccttgatatagcccacaggaggcattgtgacatatcactgggccttgcactcaggtgatgtgagttttctcttcttggtgctgccgcataggtgtattgtgacatattgttgggcctaagttatgtgactctcttgcttgtgttcttcccacttaggctattgtgacatatgcctgaggctaacacccagatgatataagtcttcatcctggaccctgtctacagaagtcattgcgatatatgtcttcaccaatcactgaggtcgaacgcccagtgatgtgactctccttcctggtccatgccctcagggaagattgtgacataccccggcccagcacacagttaatgtcactcttgtgcttgctgtctacccatgggtaggattgtgacatatatcgtggccaagcacaaagatgtaatgactgtcatacctcgaagaaagcaatagagttaatgttgctcctaggtaggcttaggaaaatgaggaagtcgtctttctgttcaaatctcactctctgacatatataaagccctagtgtgttacagagaatgtcataacagggctcctcacacaggtgagatcgtgttctatacacagcccaccaatcttgagaattgtcaccctcacacatggacagagtccactggtgaagtcctgaatcacacatgaatgcagttcacaattggaattgtgactgtcatcattgaacatctagccacaatttggatggtgattctttttttttttttttttttttttttttttttttttttttttttgagacagaatcttgctctgtcacccaggctggagtgcagtgatgcaatcttggctcactgcaacctctgcctcctgggttcaagcgattctcctgcctcatccccctgagtagctgtgattccaggcacccgccaccaagcccagctaatttttgtattttaagtagagacagggtttcaccatgttggccaggctggtctcgaagtcctgacctcgtgatctgcccacctcagcctcccaaagtgctgggattacaggtgtgaaccaccatgcccggcagtgattcatttctaaacccagcttgttaaaaggtgaggactctcctatctggactaaaccaatagtttagtttagttaggatagatgttgatgctcatatctgggcttggaaccacaggaaagatcttcttggacaaaggtcacagaggattaccactcttgcatattgtataaatcatcaagtgaaactatcataagagaacatagcacatgcgtgagattttgtcttttgaatgtacacccaggcaacagtaaagattgtcattctcccatattgaggttctgaatgtcagacacagagactgtgaaaagttgaataattgactctcacgtggatctggactagaggtggactggtgactctcagagcaagattcagcacacataagagtctgtgacttcactgaaaggacaagcctgcagaagaaattgtggctttcctgcccacattctgtcaaccattgatattgtgactcacatacttagacccaacgtacagaaagtgttgactcatacctagcacctggacatatatggaatttctactctaattcctggacttttctgcaggtgtgattgtatgcatctgctacccaccttagtgatttgactttgctgccttggcccagcccacagatgagattgtgacatatcgcttgactctgcaccttgatggtgcaatctccgctcactgcaacctctgcctcccaggttcaagtgattcttctgcctcagcctcctgaggagctgggagtacaggcatgcaccaccacacccaactagtttttgtatttttagtagagacggggtttcaccatgttggtcaggctggtctcgaactcctgacctcgtgttctgcccgcctcagcctcccaaagtcctgggattacaggtatgagccaccatgcccggcctcgctgggcctttcacccagatgatgtgagttatttttcttgcattggtactgctcacagggtgcattgtgacatatttctaagcccttcactcaggttatgtgactacttttttgcctgtgccctaactattttgcatgttaggacatattatgaggcccaacacctgtaaaatagaggctcctccctgggccttgtctacagagggccttgtgacatatctctgcatcagtcacctaggaaatgtgactccgtttttgcctgcactctgtccacaggaaacattgtgacttatcactaggcccaggtactagttgatgtgtctctggtaactgggccttgaccacagagaggattgttacctattgctgggctcagcccccatgtggtgtgactgtactgtctgtgtcctgctttcaggagaaggctgtaacatattcctggttgagtattcaggtgatgtgacactcctgtttggtccctgccttcagaaaagattgtgatgtactcctggccaaaaacccaggtgatgtgactcttatctctccctattcacaggtaagattgtaaaatgccttggtctagctcacaggtgtgatgatgttgatcctttttttttttttattttatttattttttttatttttggagatggagttgctctgtcgcccaggctggagtgcagtggtgtgatctcagctcactgcaacctccacctcctgggttctagggattctcctgcctcagcctcccaagtagctgggattacaggtgcacaccaccaatcccggctaatttttgtattttccgtagagacatggtttcagcatgttggccaggctggtctcgagctccgtacttcaagtgatctgcctgcctcagcctcgcaaagttctgggattacaggcatgagccaccgtgcccggccacaagtgtggtggtgactctcatacctcaaaccagccaataggagagatcctgtttcttatagctaggcttaaaatcatgagtatggtcatgggtcttcttgtacgaaggtcctagagaaataccactttcttttatactatataaatctcttactgtacagagattgccattccagcgttcagaacacaggtgagattgtgtttctcatatgcataccccagcaaacattaaaattgtcatcttcacacatggacagggtccactggtaagtcctgaatctcacacatggaaaaaatccacagttgaaattgtgactgtcatatatgaacatccggccagagttgaaatcatgagtcatttctaaattcagtttataggcaagtgagaatttttctatctgaacctgagagaataaaaggtggttttgaattagacaaaatagagctaaaagttcaaacaaatggtggaaggattgtaaaaatcttgcaaagaattccatgtgtggttatattgactaaattcaaaaaggtactacatggtttttctgtaaataaaaaattgaaataaaagcacaacaaggtactcgtaatgcactaatctgctttttagcaaactttgttaacggttataacagattgttgcttctttaaaattttggagtcattgtaacaaaataaataatttaggataatctgaaattctattttataacatcaagtgtttcaaatctctaacacttaacatgcttcccaaaatcatactttagtttcaaaattgcctttcctgattcctggcttttggatacttcagagggtccctggagtatctaaaagagaggtaaacagaattatttgacatgtttaggtacatgagattggcaaaatggtgtttattccatctttaggttatattttggtgaataatactaatatatgttccaaaattgtttgggatttctaaaattctaatatatggtatcaatggtaattaaggttgttatgttaagttattgtaaaccacagagatagccaaacttctttgtcaattgtgtttctaactgtaactaacctggacattttgttattcacagacaagtgttgtcttgtcttaattatttttaaaagatggtttatattaaactatagaactttcacaggtgctttcaaatacaggtttctgatagccttggagattgtgacattggaataaaggaaaaaaggacaggattcagggccgggtgtggtggcttacacctgtaatcccagcactttgggaggccaaggcaggtggatcacgagttcagatcgagaccatcctggctaacacggtgaaacccagactctactaaaaatacaaaaaattagcatggtggctggcacctctagtctcagctactcgggaggctgaggcaggagaatcgcttgaacctgggaggcggaggttgcagtgagctgagatcacaccactgcactttagcctgggcgacagagagagactccatctcaaaaaaaaaaaaaaaaaaaatgcacaggactcatgaggagctaaaatgttcacaaatatcaagcaaaacaagagttaagtaaatggactgcactcagaaaactaaagcaacctttttgacttttgcttggtatattgctgatccttgtttaattttttagagtcaaggaaacttgtttttaactactatttatggccttcaataattgagtaaagtatactcctatgaacaaaattaggaatatgtttgtttttctctgcctctttcctctagaatttggaaactatctgtgagtattctcaacttatggcaatatagttgtttgtatgagtgcaataagaatccattttctttagcaacaggatgcaactggagaaactgtttgtttgtttgttttaaccaaggctttgactgaaagggtatgcttccctttaaagagtcaagcttgacttgcagagatgataaaagccccttgaaaaaactgccctcatatccttgtctacacagtctctgtacagcgttcctgacctgtggtcagtgaaaaatatcactttttaacaggcctaggagctccaagtttgtcttgggaccttaaaaggaaaggattacccagctcacaggtatttgaggatacaaacacatggctgtgctcagctttagaaggtcttattccttgtggaagatttccatcgaagccaatctaaaaggcctatgtagagatagtcatttttgctcaccttatgcaaataatcagggcgagtataggactaaaggctatgttgcaaacaactcagtcctgttatgattttttcttttcttttttttttttttttttagatggagtctcgctctgtcacccaggctggagtgcagtggcacaatctcggctcactgcatcctccacctcccaggttcaagcaattctctgcctcagcctcttgggtagctgggattacaggtgcccgccaccatgccctgctaatttttgtatttttagtacagacaggatttagccatcttggccagctgctcctaaactcctgacctcatgatccacccacttcggcctccaaagtgctgggattacaggcgtgagctaccatgcctggccagaacccaatattttctacaatattttatacatttctttctacatggattatataaattgggctttccagcagaaaaaggaaaagaaaaagcatatgtctcaatgagagcacacaattatgagaatggcaaccatgtaaagaaaaattgcaaggacttagtgctgatgaggatttacagcaactaaaactagaaatgtaaaatgatacagtaaaacaatttaacggtttattgtaatgttatatatacatttatcatattaccaggatatccactcctaggtcattactaaagcaaagtgaaaactaatgttgaaatgcaaacctttttgtggctgtgtattgctaactttattttcaattgcaaaaagctaggtataaaccagttgctttatagcagttgaataaactgtggtgcatccataaaatagcatcctagttgtcaacaacaacaaaaaacaaattattgatctacgccacagtatgcatgagtcagacatgcatttccttcagtgaaggaagtaagatccaaaaggctacatattacatgatccaattatatggcattgtagaaaaagaaagttatagagattgattataatcaagctaggcttgatagctcaaacctataatctcagcatgttgggaggctgaggtgagagagttgtttgagtcagggattttaagagcagcctgagcaatataacaagaccttcctaaaaaaaagaagaagaaagcagaaggagaaggagaaggggagatggagaaatagaaggaggaggagaaaaggaaggggaagaaaaaagaggaggaggaaggaaaagcaggaggaagaggagaaagaataacaaaaagtagtagtagttaggacgatgaaacagttctgtgtggtactctgaagatgggtatgtgactctagacagttgtcaaatcttatgaaactgaacatcacagagaataaattttcctctgcaaaacaacacaaaacaaaaaaaatacattgatttggagtatatttagatacaatgtagaaaattttaaaaggagcttaacctaatagaaatgtattacctaaccctattaaagagggttggaatgaggccaggcatggttgctcatgcctgtaatcccagcattttgggaggccgaggcaggtggatcacctgaggtcgagaatttgagactagcctgaccaacatggagaaaccccatctctacaaaaaacacaaaattagctgggtatggtggcacatgcctgtaatcccagctcctcgggaggttgaggcaggagaatcacttgaacccagaggtgtatgttatgaagagccaagatcgtgccattgcactccagcctgggccacgagagcgagaactgcgtctcaaaaaaaaaaaaaaaaaaggttggaatgaaaggtcttaatttaaatcactttgaaaaacagtgttttgattgaatactgcaagagtcaaaaactatacacaaactgtattcttgttgttttttcataagcatatgaattagcaatttttaaaactatatgttggcatatacacacacgcatagtaattactgcctgttttttgaacttgaaaaatgttagcatcaaagggagaattttagaataaatgatgtgatgctggaccggagttgcgcatgtttttgtttttttttttttgagacagtcattgtcacccaggctgtagtgcagtggtgcattcctggctcactgaagcctccacctcccaggttcaagtgattttcatgtttgagcctcctgagtagctagaattacaggtgtgtaccaactcacctgactaatttttgtatttttagtaatgatggggtttcaccatgttggccaggctggtctcaaacccccttgatctgcccaccttgaccttccaaagtgctgggattacaggtgtgagccaccacacctggcctgttttttcaataagacttatgacacccacctcagacttccaagtatcctggaccctctggtgatatcctgtctctactttaaaaaaaaaataccaaaaaaaaaaaaaaaaaaaaaaaaaaccaccacagctctgttttttgttatttttttaaagtagagacagggtctcaccatgttgcccaagctcgtcttgaactcttgagctcaagcagtttgtcccttttggccttccaaagtgctgggattacaggcagtgtattacttggtaagaattcattaagctttgcatgaattaatgatttccacgtatatttctgtatgaatgttttatatcaacaaaaaattacatagtacatatttgcacaaaatgctaactcatctcagaataatggcagcatcttttggtttgtttatggtggaacacactcaggacaagatcatacagattgtaatattccaagaggagtattaaagccccaccccttgggtgaaactgtaggtctttttatttttacctcagtttggttcatggtatgttttttattttaagagaatgcaatttttttgttgttgttgtttgttttttccagaaaatgtcccctcacagcaatgattgccaacgccgaggcacctagcacagtgtcttgctcagtgggtactcagtatatatggaactgggttgattaaggcacaaaaccaacagcaaggttggttcagtgaagaataatttagtaatactggttagactaaaaggccatgacttagcagcaaacatttttacattcatttgagaaataatttacaattaggtcacctaaaaatgttaatttacagcggtggcatttaagcttggctgctctgtcatcacctatacagattaaaatcacactgttgcccaggttcaactcaagcaattctgatttaattagggtgttgcaatttgtgtttaggggatttttaacaccaccaccccctcccacccccacgctgccccaagtgatttttacatgcagtctgggatgaaaacaattggtttaggatgagggatggattcactgtgtgtgattatcatgagtgctgctgagatttgtcccatggctgcttctgactttgggattttgaaaagcagcgctgccattgtaaaaatcaaaagacagcttcaagatgtactcaaatactttgctaaactgcaacagaataaaatgtcttcttagcagctcggtctatagtcactttaattcaaggtaagagattgtttcaggtacagtagttttagtaagtgttgaaaatcataaatagcctacacataccaagaaactattttaatcctttgacatatttgacaggcttttccaaatcaaattttagcttacaaattgtcttttttttttgtttgtttgtttttgtttttgagacagagtctcactctattgccctggctggagcacggtggtgcgatcttggctcactgcaacctctgcctcccaggttcaagcaattctcctgtctcagccttccaagtagcagggattacaggtgtgtgccaccatgcacggctaatttttgtatttttagtagagacggggttttgctatgttggccaggctggtctcgaactcctaacttcaggtgatctacctgcctcggcctctcattaagtgatgggattacaggcatgagccacagcacccagccaaaaaattgtgtcttttttgacctctaacttttggatgctatagagtgccaatgcagcatataaaagaataagaaacagaattttttttttgttgaattacatggaaagcattgtcaaaaatgtttgatcttcaacttaatattttaataaatgttattaatgtttatttcaaaatgtatgaaatttccttttttttgagacggagtcttgctctgtcaccaggctggagtgcagtggtgcaatcttggctcactgcaaccccgcctcccaggttcaagtgattctcctgcctcagtctctcaagtagctgggactacaggcacacaccaccacgcccagctaattttttttttccttttttttcttttttttttgaggcggagtctccatctgtcacccaggctggagtgcagttgtgagatgtcgactcactgcagcctctgcctccagggttcaagtgattctcctgcctcagcctcccgagtagctgggattacaggcgccacacccagctaatttttgtatttttagtagagatggggtttcaccaggttggtcaggctggttttgaactcctgacctgacctggttttgaattcctgagcccgcctcaggctccccaagtgctgggattacaggtgtgagccactgcgcctagcctaatttttgtatttttagtaaagacaaggtttcaccatgttggccagtatggtcttgatattttgaccttgtgatccacccgccttggcctcccaaagtgctgagattacaggcgtgagccaccgtgcccagccaatgtatgaaatttctaaaaatctaatttatctgagtatatctaattgtcataattatggttattatgacaaattattgtaggctgaagacataatcgatttcttttatttgtttctttataaccatttttttttttaagacggagtttcacttttgttgcccaggctagggtgcagtggtgtgatcttggctcacagcaacctgcacctcccaggttcaagcgattctcctgcctcagcctcccaagtagctgagattacaggcatgcaccaccatgcctggctaatttttgtatttttagtagagaaggggtttcaccatgttgatcaggctggatggtctcgaacttctgaccttgggtgatccacccgccttggcctcccaaagtgctgggattacaggcatgagccaccgtgtctggcctctttataaccatttttttttttaagacggagtttcacttttgttgcccaggctagggtgcagtggtgtgatcttggctcacagcaacctccacctcccaggttcaagcgattctcctgcctcagcctcccaagtagctgagattacaggcatgcaccaccatgcctggctaatttttgtatttttagtagagaaggggtttcaccatgttgatcaggctggatggtctcgaacttctgaccttgggtgatccacccgccttggcctcccaaagtgctgggattacaggcatgagccaccgtgtctggcctctttataaccattttaagtcatttccacagttaatggtctaattctaatgcagtttctcaaaactccaaaagcttgcaaaattgtaaaatatagtgtctttaaggaggtttatgaaagtatgggtaaagtcgagtataggtttctgatcagtttgggattaattgtttggactgggtaaggactctgagaatcctaatgaagagattgattcttataaaactgctaacccaagcaaaacaaagattaattaaatattagaaaaatattctgccacatattgtgttaaatcagccagtactgaagttttttagacatgccatttgaatgaactctgtggcctaagtcaaattacctatgataacccctcagttttcagtgctgtgcacctaaattgtagaaacctggtatttaagaggacaaatttaatgttaagtgtggactcttggagaacctagacagccaacagctacttgttcattcctgagttcttaaagcttccattattaacagctctgcattccattactcatcacagaagagataaaataatctaaattaaatataaattaagtttgtggtgactcttctaaattactaaaataggttaagaccaattttttttgtcaagcatataatcccaataagacaatcaaaacttcttgtacatttctgctacctgatgagccatttaaacatttatacagaaattttatttaattgtcattttaatgcatgttttcttgtataaaagttttctcatgcaagagggttgatgttataacagtaactaaaaggatattaggatacatgttttctcatatcttcagtgataaagatacttatttctctagacaagttgtaaaactgttaaacaagatattaggctgggcatggtggcttatgcctgtaatcccagcagttttggaggctgaggtgggtggaacacttgaggtcaggagttcaagaccagcctgatcaacatagtgaaaccccgtctctactaaaaattacaaaaaattagccgggcatggtggtgcatgcctgtagtcccagctactcgggaggctgaggcaggagaattgcttgaacccaggaggcggaggtttcagtgagccgacatcacaccactgcactccagtctggagatagaacaagactccgtctcaaaaaaaaaaaaagatagatacagtagtattgagcaaaactaactaaattgactggattgcttttgtaattgcagattgatgacatatcagatccatttagagtggaaaaaatatgttggccatttaaaaatagtcattggaaggcctatgcacctaagagaacctcatgtatcttctgctactgaagtctaatattactaaattcaaaaaggctttaatgcattatgacaaagcatatgaagaaagccttaaggtgaagaaagccttaatagtctactgactgtggacagtaaaaccctttattatctagaacccagagattgagtctgcctgccatgtacactgaagcaagacatcaagactttgaaagctgggttgataatctcacaacttagaagggcccctccagactctttaattgtaaacccataggagatcttaaagctaaccagaaagatttctcctaaaaagcagatggatatctttatgtagatagcttttttaataagatcaaaaatcaagacacatttgctatcatgatactcttagttaagtttgtttatggctctacaaacaatagaaatttaaaaagcatcttttgtgtgcactcattgggtatacttatatgtagagaattttgcagccaacgtgtgaaaaaacataacatcttttataggtaaaaaatgaaaggcaggccaggcacggtggctaatgcctgtaatcccaacactttgggaggctgaggtgggcagatcatgaggtcaggagtttgagaccagcctgaccaacatagtgaaaccccatctctactaaaaatacaaaaattagtcagcgtggtggtgcactcctgtaatcccagctactcgtgggagactggggcacgagaatcgcttaaacccgggaggtggaagttgcagtgagctgaaatcgcgccactaccctccaggctgggctacagagcgagacttcgtctcaaaaaaatagaagaaaaaaaaaaaaaaactggaaggccaatatgggtgagaaattttaatgggacatttgttgtctcatcagaaacagaatgtgtgtccactgctcttaacctatttcacaagttaaagagaacttattcaaaataggttaaagagcattgccagggtgccattacttttctaaatgggcatcctttgataggtcttttttccccctggtttagagtaaatgaggcaatggttagaaatgtatcccctatcatagggctttatagcagattgcactgtaaaggctatggttacacaatagactttaaattttttgctaaagttgtgctgaatcatataatttctttggattacttactgtataaacagaagtgtctgcagttgctaattcttgtagttgcacatggagaaatacattgggtattacagagatgcagttgtaggggattaatgaacaggctgtttggttaaaataagtagactatagctaattatttgatctatgtaatgttagttggtggttcatgaggaccctggttaaaaagcacgcttcaaactcttcgtattatcctcctggtagtcaaaatagtagtctccctgctgcattgtattctcaaaagttagaaatgttttcatgcaatcacctgtagaatataaaattgtctctcactaactggaatgacagaaactcaaagacatatgtaactatgatgaaaccataacctaggaatgacataagaacaaagaccctaaataatggaaacagtggtactaaggccctgagttttggttacactgtgcactgttgaaaattttttgaacaaaattattagaggccatcattctggactgagcttgtgcactaggtccaaacagacaaaatcaaactgaaaatttaaggaaataggtagattctgtaggttttgtttttcttctgtaaacagcagatcttaacacaaggggtttccctctactcaaacctttaaaaataataataaaataataacctgaatttcttgattccactttacaaaacccatagttctgctatttcacagtggaatctgagactaagtacatttttgatggtgacagtgttatcaatgtctaaagttttggtctatcaaaatttagaagatgaccaaaaaaggagaaattgtttaattataccctaaatctaccccctttcatgtttaagtttggtcaataagtttttttgttgttttgttttgtttacatagtaaactgaaacctaactgaatgtgtaaatagactgtactcatttttgtaccaacaactgtgttttggccaataaaaggatgtcaaatgttcaaaccatgtttaaataaggaaaatcccaagctgtaatcaatctagctgttcctgtatttcacttctattttctgatgtcaccttgcttcttctgtccataaatctttcaccatcatgttgctgtgctggagtatttcagagcctactttggatccacaggctactcaatttgcaaatccctctttgcccaataaaactctgttaaatttagtttatctaaagttgtttttctttttcttttctttttttttttttttttttgagacggagtctcgctttgtcacccaggctggagtgcagtggagcgatctcggctcactgcaagctccgcctcccgggttctcgccattctcctgcctcagcctccccagtagttgggaatacaggcgcccgccatcacacccggctaatttttttatttttatttatttttatttttattttatttatttttatttatttttatttttagtagagacggagtttcaccgtgttagccaggatggtctcgatctcctgacttcatgatccgcccgcctcggcctcccaagtgctgggattacaggcgtgagccaccatgcccggccctaaagttgtttttcttttagaagttttcaaatgtattctctgatcaaaaatgaataatctgttgttgggctttgattttctaaactcatccctcagctatttttccaaattattctatgtcctttcaaaatgtttctgcaatttttttgagatggggtctcattctatcacccaggctggagtgtagtggtgtaatcaattatggcttactgcggcttttaccttccatactcaagccatcctcctgccctagtcacagagtacctcggactacaggcatgcaacatcatgcttggctaattttttttcatgaagacaggattttactatgtcgcccacgctgtgtttgaactgctgagctcaagttattctcccatctcagcctcacaaagtgctaagattacaggtgtgaaccaccatgtgcttctgcaatttcttgacaggattatttccaataataaacagtactatgtgggcacaaatctaaaaaaaaaaaaaactgtcttcttttgcagaagtgtcactctccagaatttcaagggtctgtggcagttactctagtaatatagtttgatctatggaggtgcctgagctttggagtcagaatttatcctgaggttcagcccagccaattagtagctttgggtctttggacaagtttcttcatgtgaaagagttgtataaaccacatatgcaaaaaaggcagaatgatactaattgcagaaattgcagcaatttttcatccctcctatatcctttgccacgtgcttttttacagccgttcccattgagatatggaatctgttttccagaccctagatacggctgaccttatttcctcaggtcagtagaaacctgtgaacatgaccgtgtgccagtttggggcctaggctcaaatggtcttgaatgcttctgcttttctttcagaatgctgccctctccatgaacaaagcacatgttagccagctggaggataacataacatggtgggtggggaagagaagcaaagtgcctctgttgacagaagcagaagctcacccccagaagcagaagcttacccccagaagcacagcttcctagtcaagaagcagttgttgatacatgtctgaaggagctcagctgggaccagaagaatggccccagtgagcccagcctaaatggctgaccatctcaattattacctaataagttttggatggttggttatgctgcaatagctaactaatacatgcacccagtgcagataggtgccatgatttaatgacaggttgattactagttaccttctaacagtgggctccataaaggtactaatattttcccctgatttaaagttagatgtgttgtaagataatgttgagtaacgctgcaatacatgtagatatgtatgcatgtgattggtccttagtccccgcacgcacaggagaaaacgtaaaactacatcctgacacttagggccaaggccaaatagcaaaataattttgcctttaatctgttttcttcatatctaacattggaggtccagactgtggacagatctgaagacatagagttttcttcccctgtggccccatcatcctttgttcagtgtctgatctctggaagaaaggtggtcaccagatagtgatctacctgtggttattctgctttttcttttcttttcttttcttttctttctttctttcctttctttccttatttcttttctttctctcttttctttctttctttttctctctctctttctctcctcctcccttcctcctttccttccttcctttcatctcactctgtcaccaggctggagttcagtggtacgatctcggctcattgcaacctccacctcctgggttcaagcgattcccctgccttagcctcccgagtagctgggattacaggcgcgcgccactactcccagctacttttttttttttttttttttgtatttttagtagagacggggtttcacttgttggccaggctggtctcaaactcctgacctcagatgatccacccgcctcggccccccaaagtgctgggattacaggcgtgagccaccgcgcccggtctatgttcttttgatttgtgaatattcatatagcgtattatttataaatacatatgatcttacacaaaaggttaaagtcagtaccctctggggtgggcctgtctcagttcagggaggaagtcctgcccgaaaaggctgcagcctacgctgtcactcttcattcagtccagcatctgatcacatctgtcactcagggcctgagggggcggggccttaaacgttatccaatcggggacactgggcggggggccgtccaatcaggcccgcagctggagcagacagggcggcttccgggatttggcgcggcctttgtttctcgctgccgccgaagctccaattttcgtctgtctgctttgtgtcctctgcacgtagaagcccagcctgtgtggccctgcgacctgcgggtattgggagatccacagctaagacgccagggccccctggaagcctagaaatggtgagagtgccggtccgacatcccgagagagggaacggggctggttggaaccggtgggaagcggctgtggcgggacccaggcctccccgcagtcagcttcacaatctgcgcccagagttcttgcccagctcggcctcagtccccttcagccatacgatggcggccgcgctgacagccggggccccggcgtcctgtctcttccctgcactgtgactgtgccctgccctggagccctctctgggcagctctgcacccgcagcgctgcgtctctcccagattatgcaggaaccagagaggatcgtcagaggagaatcctgactcgggctgcgggttcatgaatgggaagagctttggtctgtggcgttcccaattcctctttccttctgttaaaaatttatgggagtcatcaccaaaatattaaagaatttaattaaagaatgattctaaaattgtagagcacccagttatggggtgtagcttgttatccatgggacgggcttgaaggaaagactttcataagatgcatgatgcaaaaacccaaattcagtaatcggttaggtacagttacatagtttctaaatttgcaccttgagcgtacaaattttctggttatgtaatcagagcttaataggcagtttatagtttgttacgcctaaattttgttttccttaatgtagtaatttacaaaaaaatacatttgagttacatttttttttaaagtaggaatccaggcatcgcagccacgtacctcgaattgcctgtcacttaactattttcacactccacaggagactgatcttctgcatttttttttcatgtttctcaaacggggtctcaagtctacccctcaacccccattcctccagcctaactctgtcttgcagtaaaatactaaatttccagtttcttctgattatcccaaatgccaactttccctctctaattcacattattatctgtttgtcctttagggtacatttttgatactgtattttaattatttttttacaaaccattgggtgggacatttaaaaagatttgttttctgtttgtaaatatcgcccatgaaaataaaccaaaactaattccctgacactgtattgtaaaaaaatctctgtgcctctttttcttttgtctcccctaggcacagagatcttgtgaaagtgttttggggtcaagtttgttttttgttttttttttttgtttttttaatttttatgggatgatgtattctcagccaccctttagttttttcctggtcctggttttcagtactggctgtgaataaaccagggtacacaccatggctatgtctgctagagtgtttgatgattattagcttctgggtcattttctctcacaggacaacaagaggtatgaagtgtagtctctcaagagagcaggtggatgccctggggctaagaggaatctcctggtgtctttgaaaagctaaccacttcagacattaacattgtcttcacccaacctagcttccctttcttagagacacattgcgggtcagccaatcttatgcgggtattgagggaaaaacagaagtgatttctgcccctcggattctctgagattcatggaaaaaatagtatccaaatggcagattttacctattcttttatttggtagcattctacaaccaaatgttgtagataatgggtgagttacaagatttatgaaatcatcggttgttatttttgcagggtaaatttgtgacagtgaatatctctgttctctatcctgttatcttaatttctgagtttaatgctaaattttataaaaagaaaaagaatcatctgcaaacagagattgttttaatttcctctcttcctgtttggatgtgttttatttctttctcttgcctgaatgctctggccaggacttccaattttatgttgaatagtgggggtgagagaaggcattcttgctccagttttcaagaaggaatgtttccagcttgtgtccattcagtatgttggctgtgggtttgtcatagataactcattattttgaactatttgccttcaatgccaagtttgttgagggtgttaaacatgaaggatattaacttttattgaaaactttttctgtatcgaaataattttgtggtttttatctgtagtttgtttatctgattaatcaaacatattgatttgtgtatgttgaacaaaccttgcatcccagggatacaacctacttgatcatagtggattagctttttaatgtgctgctggatttggtttgctagtattttgttgaagatttttacatcagtgttcatcaaggatattagcctgaagtttcctttttttgttttatctctgccagattttggtattagaatgatgctgttgccaggagcagtggctcacgccatctcagcactttgggaggctgaggtgggtggatcaggaggtcaagagatggagatgatcttggccaacatggtgaaaccctgtctctactaaaaatacaaaaagtagctgggtgtggtggtgcacacctgtaatcccagctgctcgggaggctgaggtaggagaatcacttgaacctaggaggcagaggttgcagtgagccaagatcgcgccactgcactccagcctggcgacagaatgagactccgtctcaaaaataaataaataaataaataaaaagaatgatgctgcttttatataatgagttggggaggagtcccttcttctcaattttttaaaatagttttgtaagatataatacttgtttttctttgtacatttgttagaattcagctgtgaatctgtctggtcctggactcactttctttcttttttttttttttttttctcaggcagagcctcgctctgttgcccaggctgaaatgcagtggtgggatttcggctcactgcaacctccacctcccaggttcaagcagttctcctgcctcagcctcccaagtagccaggactacaggcgggtgccaccatgaccggctaatttttgtatttgtagtagagacagtatttcaccatgttggccaggctggtctcgaactcctaacctcaggtgatcctcccacctcggcttcccaaagtgctgggattacaggcatgagccagcacaactggctggtcctgggctttcttttggttggtaggctgtttactactatttcaattttggagcttgttattggtctattcactgattcattttgttgtttttgttcagttatgggaagatggatttttccagaaatttatccattttttttttttagattttctagttttcacagagaagtttgtagtagacttcagtacttattcatatttttgtggggtcagtggtaatgtcgcttttgtcatttctaattgtgtttatttggttcttcttttttcactaatcttattagtggtttattaatcttattaactttgttataagataataagataagtggttattatcttattaaatttttcaaaagatttaactcaatagatttcttatttgtatgacttttcatgtctaaatctccatcagttcagatcttcttgtcttctgctagcttaggagttggttttctcttgcttctttcattcttttatttatgatgttaggttgttatattgacctctttctaactttctgatgtgagcatcaaaaagtgctatacatttccctcttaccactgtcttagccatgttgcagagattctagtatgttgtatctttgttcccatttgtttcaaaaaactgcttaatttctaccttaatttcattatttattcaaaagtcattcacatgcagattctttaatttccatgtaattgtataatttcaagtagttttctttgtgttgaattatatatttatcaagctgtggcctaagaatgtgtttggtatgatttgggtattattaaatttgctgataattgttttatttctgattgtgtggtcagttttagagtatttgacacgtggtggtgagaagagtgtatactgtgtagatttcagatggagagtgttgtagatgtctattaggactatttggtcaagcatttagttctgatatctttgttaattttctgcctcagtgatctgtctaatagtgtccatggggtgttgtaggagtcagaatctaaatctcttcatagttctctaagaactttgtgtgtgtgtgtgtgtgtatgacagagtcttgctctgttgcccaggctagagtgtagtggcacgatctcggctcactgcaacctccgcctcccaggttcaagagattctcctgctgcttcagcctcctgagtagctgggattacaggagtgtgccaccatgcctggctaatttttgtattttcagtagagaccaggtttcaccatgttggtcaggctggtcttgaactcctgacctcgtgatccacctgcctcagcctcccaaagtgctgagattacaggcgtgagctgccatgcccagcagaacttgttttattcatgtgcgtgcatggatttttaataacatattttttctgtctgctttttttcataaacattctttcaagtgcataccgtatgcccaaggctacagcttagatgtctgcatccagtgtctactgaagttcagatgtccagtgttcaagaacatgtccagagacttggctgttgtagaaaaaagtataaattaaagataagaggctttattctcttacgtgaaagtaagggaggatattttgttcatctctctttttttaaaacatttagattacacgtagatagttttctctgctttttagaaatatatgtaaatcatagtaacagctatataaaccttttgttattctttctgactcagaattgtcttcatctaggacctcagaaccattgctttgtttttgctttggcaaaggtttttttttgtttttgtttattttcatttttagtcttttaaagtagacacaaatttgtttaaagctttttttttttttttttttttttttttagacagagtttcactcttgtcgcccaggctggaatacaatggcacgatcttggctccttgcaacctccacctcccagttcaaatgattttcctgcctcagccattcaagtagctgggattacaggctcctgccaccacccttgactaatttttttatatttttagtagagactgagttttgccatactggccaggctagtctcaaactcctgacctcaggtgatcctcctgccttggcctcccaaagtgctgggattacaagcgtgagccaccacatcgggccgtttaaagcttattttaagagcacacaaaagttgagcacaaagataagattaaatttagcaacacagaatgataaagaataaaaaagatactgagtaaacttttttgacagaaaactgattatccaaggtaattatctcatatttgcaggctaaagtacttacactgcaaaggcaagaacagttcagtttattcactaaatagtggaatctgtaggtggactttggtttctgttacttcagaacaattagtatagttaggtgtagtgtttgtagacaacttgcattcacacaaattaacattttgtataatagtatgaatataaggctacaatatttgaataaatccctttagtcattttaatattgttatttatactcttgaaatataaagtgttttaactgaattatggttatagatatttttaaagttctacatacattatgacaagtacattaaaattatttatacttagatatttatatctaatatccaaagaaaattcactacaaaattgttacagttgttattagtttgacatgcttattaatttatccaataggataattataggtaagcattgttttagtgtctttcatttcactgaatttgaatgctgcttttacaggacaaataaacataatgggctatgtgaccacccaaaaccataatagctcttcagttagctatgttgcaagctcaaatatattccactgtataacaaagtcagattccagtttttcatcaaaaagtgctggtgaaaattgtcagatgtattccaatatagatccccaattcactggttaggagatgggagagcagcagacatgaaaaagaaaccttataggccagacacggtggctcacgcctgtaatcccagcactttgggaggccaaggcaggtggatcacgaggtcgggagatcaagaccatcctggctaacatggtgaaaccccgtctctactaaaaactacaaaaaattagccaggagtggtggcgggcacctgtagtcccagctacttgggaggctgaggcaggagaatggcctgaacccaagaggtggagctttcagtgagccgagatcgtgccactgcattccagcctaggcaacacagcgagactccaagactccatctcaaaaaaaaaaaaaaaagaaaccttataaaattctgctgagaacatgcctttttttttcataatgctcatgtttctcatgctgagagtagccatgcattttgagtgtttcaagaaaaattccttttgggggactatcttctggccaagttgatcagtcttacatctaatctgagttttttcttaagatgcttttagcttattttttctttcaatataatcttgctcagattgagagctgtttttctctccaatgctttgggtgtctgtttcagaaaccctattagtatcccatggtctctgtgaatgaggtgggttgtcacagggagaatattcttggagttatctctatctggattcatgctggaaatctagcagtacttttttttttatgtcacccttataaatagaaactgagggtgaaatactgctcccattcccattactgtgaaggtgcagttctacccaggaggcctgcagtctcctctccctgcagcgcaggctccactctctgatgtgacactagagtactgctgtggcattggggttcatgtaagatgtgaaccagcagctttgagctgtgtgttgtgggctgtgtttcagtggaagttggtaggcgtaaagagaggacactggccactaggagaacgcaagcagggtgctgcatgttctacattctgtgagaggttccgagagtaaatagaatctgatggccaaatctgtaaatgtaaacaagcatcttaggagtgaaagatcaaggctacaaagtatccagagccataaccacaactatacctaccagtaaaatgcaagactggaatacagtattgttgtccttcctcttactgaagagctagaatcaggacaggtgatccaggttctggagctcgaccagagcagttccattttttatttagaatcagcctgagtctctcctgcctggcttatcattgggcaatcaacccagggtaactgggaaccctctcacaattacctagccatctttgaaacatttgagaatatccagagcagaattttatcaggctgacaagagtggttaatgctacttctttctcagtgtaaaagaaatgagtcattctgtgtttgttcctccctcatacaagagataattttggttggtactcagatgatagtttccccagttttcttgtacttgggtgaaaaacaaggaagaggtctagaaactaaaacagataaactgattgctttcatttcatattatcattagaaaaataggtagagcagttatggttcttatcatacagaaacttttagtctagactagtgatatggcttggctatgtcaccacccaaatctcatcttaaattgtaactcccacagtttctacatgttgtggtaggaacccagatggaggtgattaaattatgaggggaggtgtttcctgcactgttctcatgatagtgaatgagtttcacaagatctgatgattttaaaaatgggagtttccctgcacaagctctcgttttgcttgccaccatccacgtaagatatgacttgcttctccttgccttctgccatgattgcgaggcctccccagccatgtggtattgtaagtccattaaatctctttttcttcccagtctctggtgtgtttttatcagcagtgtgagaacagactaatacaaaaaattgttaccagtagagccgggcattgatgaaaagatacctgaaaatgtgcatgtgactttggaactgggcaacaggcagaggttggagcagtttggaggtctcagaagacaggaaaatgtgggaaagtgtggaactccctagaaacttgttgaatggctgtgaccaagatgctgataatgatatagaaaataaaatccaggctgaaatggtctcagatggacatgaggaacttgctgagaactggagcaaaggtgacttttcttatgttttagcaaagagactggtgttattttgccccttccctagagatttgtgaaactttgaacttgagagagatgatttaggttatctggcagaagaaatttctaagcaaggcaggtctctgttgagccatggatgccagtctctgttctgcaggataggttttgttaaagttgttaaaaataatgcctattttaagagataacaaatgaaatttagaggacaagaggataaagctaattactattcttggaaatgcttgatgatacaggataaaaataaatacaacacacccaaatacaggatgatagtttttttgttagttgggttttttaaagcataatgcaggagtagatttattatagctactccaaatgttgaagagtgatacagtgaccacagagttaaaaactctcactgttattgctgtttattttacaataattggtttagtctacaagtttaaggcaaacatactaatgcatttgcttttcttcagaaatcataaagattacataaaatctgtaccaaaacttctaagaaatattcagtagttaaaaataagtctgattaagatgctttaccaggatacatgaatgaactaaggtggtatataatgcttttttaaaacaaaattttaaaaaattctgttttaaaggcaataaaggcaatctttatcttgtttgaacaatgcattctgaaaaggttaaacttcagaaattatttaaaggtaaataagattggcatccataaggaatactatttataaaataaatgcagttatagaggctactttaaagaagaataaaacttggacttctgagtatgatgagtgcacaataatgggccactatcttggggaacacagtgcggcattacaccacacagactggcatcgcctgtacatggtgctgctccatgcttctcagaaaaagagtagatccattttgtcagctgttttttatttgtttccagtgagcataaatgcgtaacatcattaagaaaacaaaaataaaatttgaaggaaggcagcccttttcaacaggaaggcagaatgtggcttatgtgtctccgtttagcactgccaggcagtttggcagcaactgtaggttaccctttgcatgcttcagttctaactctgccagttccactagtttttttttttttctgaatgcagcaatgcttcttgtcttaaaatctataagttcttgttttgcagactgagatttttttttttcaaatttctgactacataattgttgggaagttttagccagcagaacatctttattttttgctcttgctttatccagtgctatattagcattttcataatccagtagtgacctagaccttcaatacaggagatccttagcagcttgagtttctcttaagtaatatttttaagggtcagaaagtttgaggtcctcatcagcagacactcatgcttctatttttcttgttttatcaaacatttctgaaactttgagaaaaaacttgcgtatatctgtagaatcccgagttcctaaagcatataatgaagaaccaattctattgtaataatctgcagcacttttgtgggatcttgtccttctatgagttagcagatgcatccttatctcggttatgatattctaaaagaaatgtttgttcatgctcaaagaaattatctacatcctttactccggaaataattactccatctgctgatttaaccatgtttttaaagaaatcttcaagtttctctttttatttttccttgcacactcaaatcttgattatattccaagaagacatggaaatttaaatattttctcaaaataggatgtgctgtcacatgacataggaacacttcatgcatcacaactgtgttcttggatattcccaaatattcagcttccagttcctgtttcatctttgtgaattcttcctttgtcattgacccttctccttctccaagcttctgtactttttcccttgaagcatcaaaatcagctcttggtggtgctggtggaatgatgtaacctgcatagtcttcatttttaacaaaggaatcatgaagccagataaattgctcatgttgctgaacaacagaaaactcattttgtttaaaatttggcaataaactctttgtgtgaatggtgaattttactttattccgctcactaagagcatcagaaatgtccaccagcagagcaggatcactttgaagatctacatttattgctttaagtccacagttctcttcctgagaggaagttagggccatcgtccaggtcttccatcctggctgctccacaggatgatagtttgtgtaacaaacaaatattgtcagattgcttatacccgtatagaagaggatgtgatattacacacagcatatgctcgtaaactgccaaaatatgatgtgaaggttggcctaaccaattacactgcaatgtattgtactggcctgctgctggcctgcaggctcctcagtaggtcaagatctgtgacctatggcatggacaagatctgtgaaggccaagtggaggtgactggcaatgaatacaatgtggaaagcactgatggtcagccaagtgccttcacctgctatttggatgtaggccttgccagaactaccactggcaataaagtttttggttccctgaagagagcagtagatggaggcttgtctatccctcacagtaccaaacagttccctggttatgattctgaaagcaaggactttaatgcagcagtacaccagaagtacatcataggccagaatgttgcagattacatgcactacttaatgaaggatgatgaagatggttacaggaaacagttctctcaatacataaacaaaagcgtaactccagacttgaaggagatgcataagaaagctcatgctgctatgtgagagaatccagtctatgagaagaagcccaagaaaaagaagtggaaccatcccaaaatgtcccttgctcaaaagatcgagtagctcaaaagaaggcaagcttcctcagagctcaggagtgggcttctgagagctaatccaaacaattttcaatgaggattttttagatgaagaaaataaacttattgacagcaaaattttaaaaaaattaaatttataagcagcaaagcattcaagagattacttgggttctgttaagggcattcagttttaaaatggaaacagagcataaaagtttggaaaatttgcagcctgacaatgcaatagaatagaaaacctcattttttgaggagaaatttaagccagctgtgggaaaaatgtttccagttcatgacagaggtcttctctgcagccccttccatcacaggcccagaggcctaaaagaaaaagacggctttgtgggtcaggcccagggctcccctgctctgtgaagcctagggacttggtatcctgtattccagccactacagtcatggctaaaaggggccaaggtagagctcaggctgttgtttcagagggtggaagccccaagccttggcagcttccatattgtgttgagcctgtgggttcacggaagtcaagaattgaggtttggcaccctccacctagatttcagagctatatgggaacccctggatggccaggcagaagtttgcagcaggggtgaaggcctcatgaagaatatctgctagggcagtacagaaaaaaatgttgggttggagaccccacacagagtccttactggggcaccgcctagtggagctgtgagaagagggccattgtcctccagattccagaatggtagatccactgacagcttgcaccatgtgcccggagaagccacaggcactcaacaccagcccatgaaggtggccaggagggaggctgtaccctgcagagccacaggggtggagctgctcaagacgatgggaacccactttttgcatcagcatgacccaatgcgggacatggagtcaaaggagatcattttggagctttaagatttgactgccctgcttgattttggactcgcatggggccagtagcccctttgttttggccaatttctcccttatggaatgactgtatttacccaatgcttgtatccccccccccattatatcagggaagtaactaacttgcttttaattgtacaggctcataggcagaagggacttgccttgtttcagataagacattgaattgtggacttttgagttgatgctgaaatgagttaagactttgggccgggcgtggtggctcatgctagtaatcccagcactttgggaggccgagacgggtggatcacgaggccaggagattgagaccatcctggctaacacagtgaaaccccatctctactaaaaatacaaaaaaattagccggatgtggtggcgggcacctgtagtcccagctactcaggaggctgcggcaggagaatggcgtgaacccggaaggcagagcttgcagtgagccaagatcgtgccactgcactccagcctgggtgctggagcgagactccgcctcaaaaaaaaaaaaaaaaagactttgggggactgttgggaaggtatgattggttttgcaatgtaaagacattagatttggaggggccaggggtggaatgatatggttttgctgtgtccccacccaaatctcatcttgaattgtaattctcacaagtcatgggaaaaacacggtgggagatgattcagttatgggagtgggtcttccctgcgctgttctcgtgatagtgaatgaacttcagaatatataatggttgtaacaacgggaggtttcctgcacaagctctctctttgcctgccactatctatgtaaaatgtgacttgcttctccttgtcttttgccatgattgtgaggcctcctcagccacgtagaactgtaagtccattaaatctctttctcttcccagtctcaggtatgtctttatcagcagcatgagaacagactaataaaactagcaactgaataaaggttgaattatgcatcatatggtaggtaaataaatgtgtgcaaaaaaaacttgggctttatttcggccatgttctttatattgttgtgacttttggtgttttcacctgaaggaatatttatgaacagaagggttgttatgattatttgtatttcttttaccttactaaaaatacatattcatcttttaataaaattatccgcggaaaccttaaatgatttgtttaaatggcttattagtatatgatataaaattgacagggaagtgactataaaaggtttaaattacacaaactctgagatttaaatttctcttaggtaagcttaggaaaaacaaaactggaaatatccccattggcatacagaaccaaattctagctagggtccactccctgccccagttctgttcagatttaccccttttgaaggccttatttaagtctggccctaccctggagtctcatctcacagaactgattagaaaagatcagttttgggtgatgaatcctgttccatttttagagctggtgctcacaattttctgaaacagaaaagcagataaatgagaaatataaagtatgaattttagggtctttttaaaattattaaaaccagtgcttgcagagacattttatttagcaacttgttttccattcctgcagatctactcgttgctccccaagccacaagaagtaaatataaaaacaataaaaatttctgtaaattatattaaactcttcatttctctattcctctcatctgtttatgtttagtttttattctacacatttttttaaaaggtcaatgacagagaaacagaaaaaaatatggatcatttttctaaatactgggaattattgaacacttagtatcaacacacagggtgttattaagattaaatcctgtaatgtgctatcacagtgccctgtagcatcttattgagcttgtagtacctgaataataaacattgcattactgcatgtgtatatgttgttttctaaatgcagacttaaacgttgctttctaaatacaaaaacaaaaaacaaacaaaaaacattgttgctttctgtttcttctgtaaactttaaaaaagccagcaaagattataatactttaaggtggagattgattgtctttatttgtaccaaaagtgtttgtattgtcacaagagtgctgagtgtaatgaactctgtgctgtgcctgcttgctctaactaatgctaataatgaccccaggtggagaaacatcagcattgataggaaacttgtttataacacccattcctgtatcctttcaaaacctgcagaatcacatttcatagagtagggccaaaattaccaagtgatttataagctgttaaagctggagaggcaatgcttagttaaatggttataagcccaggcttctaattagaatcatgtgactctaagttgaggccagaatcaagtatgagggttcaagatacatttatgatagttaagtctcatctttgcactaaagggtggtcccagaacctgttctgtttgggttgcataggaacagggcagtgtggcccacgtttttcttaactgtagcagaaattgctggtgtctgtggcaggggagggcacctgaggacaggaaaggagaaacatatttttacatctgtggagcagcttattgttcctcaatctcttctgttataaaggacagaaatgggtagagtttttctgtattggtccttctacctatgagtgtggtggtagcaggtaaagatgtggtgcttacattgttaaggcatattctccagatgcagatgtaatttgtttcaaaaatctcatctgagaagaaattccagagaaagacgagaagagaaaaaatggctttttttcagctaaacatgccttggagtaagggttgtgtccactctgcctgctagaatgccatgcctttagtacttgccaaactttaattctctacttgtgcttttcctcttaaatgagtttgttgtaactacgttttaaaattcttataatagtcaaggatctcagagaaatatttctttcctatgtaccagagccttctctacattctctacatcatggcttcttatatgccatgattctcaccatgaatttataatctgcaatattaaaaatgttccctttgtggctgttgaacatgggaaggtgtggatgctcaagattcctattggggaaacgccagggttcttagtaaaaataaagaccatgtaatgttgaggttctgtctgtgttctccatcagctctatgtagagaaggattaagaaaatgcttatttaaacagggtggcatttattacccagtaagttctgaaaaaaattattaggagatacttgttctccatggtgctaaagaaagactatttaaaataactattaactattaacaattatagaacatgggaaatatctgtattttgaactttgcataaaactgatgtttctttgtagttaaattcaggctgtaatttacttttggagggccactattacaacagtgatgctgtgtcctgtgtgcatcagcacatcataaaaatttgccttagtccagttgatattagtaactcacttgattaatgaagctgacagatttcttcaatatggagttaattatttttctcttcattagtagtttctttatgcagctgatgtgcagaaaccatcacatttaatctggcagctgcccttcttatgttttctttgcctttatctgcctatggaaaatgaaagctctaatgtttgttacaggccagaaaaactggaaaaaaaagactacaggctcttccagttactccatatttgacaaaatagccttcttgggccataaatattggcatcactggtcatcttgtgttttttttgttttttttttgtttttgtttttttgagacagtttcactcttattgcccaggctggattacaatggcacaatcttggctcactgcaacctctgtttcccaggttcaagcaattcgcctgcctcagccttcccgagtagctggaattacaggcatgcgccaccatggccagctaattttgtgtttttagtagagatgggatttctctgtgttggtcaggctggtcccgaaatcctgacctcaggtgatccgcctgcctcggcctcccaaagtgctgggattacaggcatgagccaccgcaccaagatccagaaactcaggctttattccagaccttctgacacagactgcattaacaagatcttcagtttattgtagacattacaatttgagcagtaccttctaactcaatgtgacttttccatctgaaaagtttacacaactctttctgtatgatgtaaatataccactcaaaaatgtacatgttagtgttcatgtcttacttcatcatctggaaaagtatcatataaatactgatattttggatcttatgccaatctcttttctcagagttagagtatattttcacagagtagagaatatttctgtgttgaaggttattagataatttcagtcacccctataagtaagacccaattatatttactcttatttcaccttgagtgaaacttaaaattctgcccaggggcacttggtaaatatgtgtgtttgtttgtgtttttcagggagcgttgacatttagagatgtggccatagaattctctctggaggagtggcaatgtctggacaccgaacaacagaatttatatagaaatgtaatgttagataactacagaaacctggtcttcctgggtgaggataactttaatatacaattcctaatataccctatagatttcatttatttttgtaaaaattctgtgctttcagatcccgggtttttttctttttctttttctttttttttttaagtcctcaggatttgtcccctgcccctctgcccggccagccgccccgtccgggagggaggtgggggggtcagccccccgcccggccagccgcccagtccgggagggaggcggaggggggtcggccagccgccctgtccgggagggaggtgggggggccagccccccgcccggccggccgccccgtccgggaggtgaggggcgcctctgcccggccgcccctactgggaagtgaggacccctctgcctggccagccgccccgtcctggagggtgggggggggggtcagccccccgcccggccagccgccccatccaggaggtgaggggcgcttctgcccggccgcccctactgggaagtgaggagcccctctgcccggccacgaccccgtctgggaggtgtgcccagcggctcattggggatgggccatgatgacaatggcggttttgtggaatagaaaggcgggaagagtggggaaaaaattgagaaatcggatggttgccgggtctgtgtggatagaagtagacatgggagacttttcattttgttctgtactaagaaaaattcttctgccttgggatcctgttgatctgtgaccttatccccaaccctgtgctctctgaaacatgtgctgtgtccactcagggttaaatggattaagggcggtgcaagatgtgctttgttaaacagatgcttgaaggcagcatgctcgttaagagtcatcaccactccctaatcttaagtacccagggacacaaacactgtggaaggccgcagggtcctctgcctaggaaaaccagagacctttgttcacttgtttatctactgaccttccctccactattgtcctatgaccctgccaaatccccctctgcgagaaacacccaagaatgatcaataaaaaaaaaaaaaaaaaaaaaaaaaaaaaaaaaaaaaagtcctcaggatttgtccatgtagaaaagaatttcaagatgttttattttgacctgaactttccactttcctgagctgatttgtttccttcactctagattaggattaattttagaaatttagttgcaacatattgttgctcacatcttaaaatttaatcaccatcaccaatttttgaattagtacaaagtagttaaattaagaacctataaaattaaaatatttttaaatatttagaaatttcttttctttattttttttatttttttggagacagagtctcattctgtcacccaggctggagtgcagtggcacaatgtcggctcactgcaacctctgcctcctgggttcaagcgattctcctgcctcggcctcttgagtagctgggactacaggcgtgtgccaccacacctagctaattttttcgtatttttagtagagacagggtttcactatgttggccaggctggtcttgaactcctgaccttgtgatctgcctgcctcagcctcccaaagtgctggtattaaaggcatgagccaccgtgcctggtctatttagaaaatttttataaattattattttggggttaatttactagaatattccattacattctctttactgagagcattactaagttggtaattggagaatatgagcaagattcatgttatttttcataaaacaggtattgctgtctcaaagccagacctgatcacctgtctggagcaagaaaaagagccttggaatttgaagacacatgatatggtagccaaacccccaggtaggtgacagtaaatacaatacacaaaactgataagagatctatagtttaaaaaaagaaaaaaaaccagtttttaaaataatttgggaagctgttttacaaaggaaatagtttctgtttctttttatttattttgctttttatttattttttttcctctcacatagaagcatcttttgttttatcttttttaaaatctctaaaaattctttccctttggtaatcttactttacagtgagagccaaagtccatttcatggcatataatagactgcacaatctcactgcttttccattgtttctggaaacacacagatatttgaataattttgagaaactctatgttgaactatttttattttatttatttattttttttgagacggagtcttgcactatcaccagggctggagtgcagtggtgcgatctcggctcactgcaacctctgtctctcggattcatgtgattctcctgcctcagcctcctgagtagctaggattacaggcgtgcatcaccacacccagcaaattaaactattttttaagttatctttttgcattatgtctgaaatgtgtgagaatagtggtttctgtttcatttatttattgctaatttttctgcatattccatgccgttttattactatagttttgaaatatagtttgaaattatacagtatgatgtcctcctgcttttttttttttctttcaggattgctttggctattcaaagtttattgtagtttcatgtaaattttggaattgtattttctattaccttaaataactggaattctgatgggagtttattgaatctagagacaccttagataacaaggcattttagcctgggcatggtggctcacacctgtaatcccagcactttgggaggctgaggcaggtggatcatgaggtcaggaattccagaccagcctggccaacatagtgaaaccctgtctctactaaaaatacaaaaaattagccggacgtggtggcaggcacctgtaatcccagctacttgggaggctgagacaggagaattgcttgaatctgggaaatggaggttgcagtgagccaagactgtgccactgcactccatccagggcaagagagtgagactctgtcaaaaaaataaaaattaaaaataaggcactgcaacaatatttattctttccattaatagacataaaatatttttaaatttatttgtgtcttctctaatttttttaattgatatatctttcatttaaaatattttttagttccttggttaaatttgttctcagaaatttattttagtgctattgtaaataaggttactttctttctatattttatcagatagtttaagtgtatggaaccataacgtatagttgtatgttaattttctatttgctaatgtattgagtataattattactttaatcaggttttaatgtactgtttatggttttttatatataaagtcaaatgctccagaaccagcagcttcttacttgtcttcaatgtcagtgactttaaaaatttattttgactaatttttctgccacgtaccttcagtgctatgtttaagtagaagcattgagaatgggcacaatatagttttgctttgttctctgtgaattttaagaagcaaacacctcttcaggtttttataaactggcttcaagatgtaaagatattcttttgttgggtgcccagggtgatagaatgccctctgggcttatagtggagaggggttgtagcttggtaacaaggctgctgggtcttcactggggtccaactttagttgacttgttacaaggggcttgggtagttataattcccattatatttttgggcagagtgaatatcctttaggactttgctctgtagggtagacactagggcaggtttctgcaattggttgtgcatatatggtgggctttatatcaaaatgtagatgaaaatggctttcacggccgggcgcggtggctcacgcctgtaatcccagcactttgggaggccgaggcgggcggatcacgaggtcaggagatcgagaccatcccggctaaaacggtgaaaccccgtctctactaaaaatacaaaaaattagccgggcgtggtggcgggcgcctgtagtcccagctacttgggaggctgaggcaggagaatggcgtgaacccgggaggcggagcttgcagtgagccgagatcccgccactgcactccagcctgggcgacagagcgagactccgtctcaaaaaaaaaaaaaaaaaaaaagaaaatggctttcactgggtaccagaaaggatttccccaggtctctgtgtgggtttccatgtaggtagagctgaccatgaactgtggctcaaagagctggaactgagtcatgcaagtgcttcggggaagacaataaggaccaaggtctgcagtcttgtctgtgtggctataaatgagtgtctttctccaggcctctgaaaaggcaggacctcttccagactttggctgggaagagttttggatggtttcagagtaagttcaaaattctcagtgggaccaagttgggtggataattttctggtctgtagccaagaacaggggtcctgttgtttgccacctgaatgaaagcctgccttctaaaaaggatgctcctcaatcttgggcattagcagagtttcacaacttccttcctgaatctcagagctctcttaaaggcacttattttggagatggggtcttgttacataacccagactagtcttgaaatctttgcctgaagcaattcttcagccttaatgtaccatgtagctgtcattacaggtttgagccatgatgcctgtttctctcataaaggcattttttttcagggattgctgacagattttcttgctgtaggaaaataagcaaatagggcaccttttatttttccatcttactgatgtcactctccctgtacatttttactttctatttcaattttgtgtgtaattttagattgaaacatttagggaaatatactagaattgacatgttatgtctgaagtaaattagataattagtaggcaggcaggcaaaaagaaatagacaggcaaaatggaattataggattttcacccatgtttgtcagcctatgtctaaaaaataacatgatttattctcaaatatttggtttatatatcagagatcctaactatattctgcaaaaaatatatttttttttctttatttagcattgtaaagctattctttgcttctaagcttggattacagcagtttcattttgtgtataaatagcatatatttaaaacttaaaaattatttttagtttcttttaaatgtttatcaaaagtttttcatagaatcttctatttataattatactgcattttatctgaaattttactaccatatagtggatgccagtgattcaaaatacctttcctccatgagtacagtttcagtctaatattgcattatctagacaaactctttttttgtttttattttttgtttttttctgagatggagtcttgctctgtttcccaggctggagtgcagtggcacgatctcggctccctgcaacatccacctcctgaattcaagcaattctcctgtctcagcctcccgagtaactgggactacaggcacctgccaccatgcctggctaatttttgtatttttagtagagacagggtttcaccttgttggtcaggctggtctcgaactcctgacctcaggtgctccacacacctcagcctcccaaagtgctgggattacagacgtgagccactgtgctcagctgacaaattctttttaatgctacatcaacgttgcataccagattttatgagtaagcatttctgttattattgttttgcagttccatatcagtgtgttttttcggtgtgggtttcctaatatcagtttattgtgtttgctggttttacagttttaggcggtttgcaactctgtttgtacatataagtcaatgtgggatataattaagagataaatcagccatatgtttatcacaatcagattatgtgtgtgtgtgtgtgtgtatgtgtgtatctataaatatgacccctactttggttatggcacatcttatatatttttttttctcagcagattttccatggtgtttttttcttgtgtaagtgagtagtcatgaaagtagttttattttcaccttgtgtttaataataaatatttcctttgagaaaaacacttttgtgacttgaaggtcatatttgaaaaaatttataattttgtatcttttaatttattctttttaaaaaatagattggttgtggtggctcgtgactgtaatcccagcactttgggaggccaaggtgggcagatcacttgaggtcaggagtatgagaccagcctggccaacatggtgagaccccatctctactgaaaacacaaaaaattagccgagtgtagtggcgtgcacctgtaatcccagctacttgggaggctgagacaggagaattgctttaacccaggaggcagaggttgcagtgagccaaagtagcgccactgcactccagcctgggcaaagcaagactcggtcttaaaaaaaaaaaaaaaaagatgtaaaaacatataacctaaaatttaccatcttaaaactatttaaggccgggcgtggtggctcacgtctgtaatcccagcactttgggaggccgaggcaggctgatcacaaggtcaggagttcaagaccagcctcaccaatatggtgaaaccccatctctactaaaaatacaaaaattggccaggcatggtggccagtgcctgtagttccacctacaggggaggctgaggcaggagaatcgcttcaacccaggaggcagaggttgcagtgagcctagattttgccactacactctagcctgggtgacagagcgagattctgtctcaaaaaaaaactaagtattcatttcatggccagtcatggtggtgtttcacatctgtaatccctggatattaggaggctaaggcaaaaggatcgcttgagccccaaaatttgagaccagcccaagcaatatatggagaccccatctttccaaaaaaaaatttaggctagatgtggtggctcacgcctgtaatcccaacactttgggacgccgaggtgggtggatcatgaggttaggaaatcgagaccatcctggctaacacggtgaaaccccgtctatactaaaaatacaaaaaaattagccgggtgtggtggcgggcacctgtactcccagctacttgggaggctgaggcaggggaatcacttgaacccaggaggcagaggttgtagggaggtgagatcacgccactgcactccaacgtgggtgacagaatgagactccgtctcaaaaaaaaaaaaacaattttaaaataaacagacatggtgttgtgcacctgttatcccagctacttgggagattaaggggtaaggattaattgagcctaaaagtttgacgttgcaatgagctgtaattgtgccactgcactccaccttgtaatctgtagattgcattgagcaggatagacacatttacaatattaactatttcaacctttctacaagagcacaatcaagagtgtgttaatttttatatatttgtgaatttttttagtttttttctcattatttatagtctcattccattttggtcatataaagtaatttatacaattttagttttaaaaaatttggtaagactttttttttggcctaggacgttgtctatgaaggaaaatgttctatgagctattgataaaagtgtgtatcctaaggttattgatgggtgccctctatacctttgttaggaataattgttttatactgccttcaagttgtctgttttcttactaatattctgtcttgttttatttttattacagaaagtgcaatattaaagtatacaataattatattgctctctatgtgtttcttttattctgtcgatatttgctttatatgtttagagccctaatgtgagagatatatatactcacacatacacacacagaaacaaacacacacacatacacagaaacacacgtgtatatacaaatgtttcataggttcccagtgaataaatctataattttttgaggtcctattttgtctctttagagttttgacttcaagtacattttataaaacatgatagtttttaacttaagatgtagttgcataatattattttgacctcttctgctctcatttgattaatatttgcatgaagcatctacttccatcttcccactttcagtctgtttttatcattagatctcaagtgacttgtagaaaggcaagttggatcttggtttttaaaatgtttaataaatctatttattgaaagtatgtctcttggccaggcgcggtggctcactcctgtaatcccagtactttgggaggctgaggcaggcagatcacaaggtcaggagattgagaccatcctggctaacacggagaaatcccatctctactaaaaatacaaaaacaaaaattagccgggtatggtggcgggcgcctgtagtcccagctacttgggaggctgaggtgggagaatggcgtgaacctgggaggtggagcttgcagtgagccaagatcgcgccgctgcactccagcctgggtgacagagtgagactctgtctcaaaaaaaaaaaaaaaaaaaaagtttatctctcaatttgaaagttaattatatatatttttaaataattttatgaaagagaaagacttactgttattttattattttgattcttgcatttttgtccctcattttctctttttgtctttctttgtgtctttttgatttttgtattgatatggttttactaatttcttattctctttgtgtatctatacagatattttctttgtggtaccttggggattacataaaacctcttaaaaaaaacaagagtagccaggcgtggtggctcacgcctataatcctagcactttgggaggccgaggcagatggatcatgaggtcaggagatcgaggccatcctggctaacacggtgaaaccctgtctctactaaaaacacaaaaaattagccgggcgtggtggcaggcacctgtagccccagctactcaggagtctgaggcaggagaatggtgtgaaccccgggaggcggagcttgcagtgagccgaaatagtgccactgcactccagcctgggggacagagcgagactccgtctcaaaaaagaaaaaaaaaaacaatatatttttggtttggtaaaaaattaacttcaactgaataaaaaattcttccttattacatctgccttgaaatttgtcattgatgttgctaccatctttttatgttgtatatttattaacaaatgtttataataattgctatgcttttatctttcaaattttagagaataatttaaaatgttttctgcaccattatgataatgctacaaaaatcctttttttatgtatgtgcatatttttctcagaacataatttgtttttgtttgattatatggtattttcttgaatccttttattttccgtttcaggaactgctttcagcatcttttatatgtttgtgaagttttataagtatatgcagtgccaatatactttttcagaatttggctattttggaacatcattttttcatttttcaggacagatttgctgatggtgttactctcacttgaaagctattttttttcccaggactttgactgcatcacacagtttctttccggcctacaaaatttttgttgacaattcactggttatatcgtaagactatgtttgtatatgacacatcacttttatcttgtagctcccaagatgctctgtgacttttgaaattgtgcttatatatgtatttgttataaatattttgtatgtattctagtttgtttgttaagcttcttcatgtttacattatttttcttactgagggatttttcaggtattatttcttcttgtattttttacccccataatttctattttttaattttttcaatatttttgttcttatcttcatttctgattttctgtagtctgtgttcctgtttcactcattgaatattcaattttttatcaatttttaaaattaatgtgtacatcttttctatggtttccttctgaaaattttataatatttttgatggaattatattgccctgttttgtatatattgtaatctttaattgagatttggacattaaaaaaatctacctgtcacaatctttataatgtagttctgtcctgacatagtctaaaagcaatcgttttggctagacattctgggagtctctcacacatgttcttaaaatgtgtcttgtctaaaattttgtgtttgcttttagttaaaggagtttgtgtttcttcttaaaaatcagtaggccagttgtggtggctcatgtctgtaatcccagcactttgagaggctgaggtggacatatcacaaggtcaagagatcgagaccatcctagtcaacatggtgaaatcccatctctactaaaaatacaaaaaattagctgggcgtggtggcatgtgcctgtagtcccacctacttgggaggctgagtcaggagaatcgcctgaacctgggaggcagaggtttcagtgagctgagattgcaccaccgcactccagcctgggtgacagagcaagactcttgtctcaaaaaaaaaaaaaaaattagtaatcacttgctacatttgttctctgtctgtgataccacagtctctctgatgctgtaaaacttatttttttgtctcagcaggctcaaattgtcattttaaagtatgccaccatttctttcagaactttttgtcataagagatagaaaccagtgtctagaaaagcccctataaaccagaaataaagatgtatgtgccagtattttaacttgtcttttaaaaaggaaaccaagagttggtaatttacttgtaaagtcactatgttacaatggaggggaggaagagctgtgttgggtaaaatgtaacagactttcttttttcctctatatagctctttgcattgtgttcacctggggcactgtacacactcaacttacttttttacaaatgtactttggatttttgttacatttatatgtttatgaagaaattagggcctgtggtattttgctatgctatcttgttatgtagtttgtataactttataggttaggtttataaactatactcagtctagtacatgcagtaatttgttatttttatttctttcagttatatgttctcatattgcccaagacctttggccagagcaaggcataaaagattatttccaagaagtcatactgagacaatataaaaaatgtagacatgagaatttactgttaagaaaaggctgtaaaaatgtggatgagtttaagatgcacaaaaaaggttataatagacataaccagtgtttgacaacttcccatagcaaaatatttcagtgtgacaaatatgtgaaagtctttcataaattttcaaattcaaacagacataagataagacatacttcgaagaaacctttcaaatgtaaagaatgtggaaaattattttgcattctttcacacttagctcaacataaaaaaattcatactggagagaaatcctacaaatgtgaagaatatggcaaagcctttaatgagtcctcaaactgtactacacataaaagaattactgagaaaaaaccttacaaatgtaaagaatgtggcaaagcctttaactggttttcacattttactacacataagagaattcatactggagaaaaaccctaccaatgtgagaaatgtggcaaattttttaaccaatccacaaaccttactacacataaaagaattcatactggagagaaaccctataaatgtgaagaatgtggcaaagcctttaaccagtcctcaaaccttactgaacataagaaaattcatactaaagagcaaccatacaaatgcgaaaaatgtggcaaagcttttaagtggtcctcaacccttacaaaacataaaagaattcataatggagaaaaaccctacaaatgtgaagaatgtggcaaagcttttaaccgatcctcaacccttaatagacataagataactcatactggagggaaaccctacaaatataaagaatgtggtaaagcttttaaccaatcctcaactcttactatacataagataattcatactgtagagaaattttacaaatgtgaagaatgtggcaaagcctttagccgtatctcacaccttactacacataagagaattcatactggagagaaaccctacaaatgtgaagaatgtggcagagctttcaaccagtcctcaacccttactacacataaaagaattcatactggagagaaaccctatgaatgtgaagaatgtggcaaagcttttaaccggtcctcaaccctcactacacataagataattcattctggggaaaaaatctacaaatgtaaagaatgtggtaaagcctttaggcggttctcacaccttactaggcataagacaattcatacataaaattgtaaagactgtggcaaagcttttaaacaatctttataccttactacacataagataattcatactgaagagaaaccctacaaatgtgaagaatgtggcaaagcttttaaccagtcctcaaatcttactaaacataaggtaattcatactggagaaaaacctacaaatgtgaagaatgtggcaaagtcttcaaccaatcttcacaccttactacacataagataattcatactggagagaaaccctacaagtgtgaagaatgtgacaaagcctttaacaaatccttaattcttaacagacatgattcataccagagagaaactctacaaacctgaaagttttaacagtgcttttgacaacacctcaaacttttccagatgtcaaagaaatgctggtgagaaattctagaaatatgaagaatgtgacaaagccattaaattgttgtcacatttaattgtaggtaaggtgattcatactggagaaaacttctacaagtgtaaacaaagtggcaaaacttttaaccaatgctcacactttattgcacaggacatttatacttgagaataaatatacaagtgtaaagaaagtgaaaaccctattaatatctgctcacatcaactcaacatcagagttcatacttaataaaatcattaaaagtgcaattactgtccaaagattttttcagaaaatataagcctttaaacttcagaagatgatttattttgaagacaaacattgaaatgtagagagttatagtaactttacttgtatcacaatcttattctactcattttgtactagaggcaaaccctgaagccattgctcaaattttgttcgacatcagacagataatttgtattaatgaaaaactctccaaataaaatagatttggagaaaacatttttttcaaaaactacagcttaggaaacttcagagagtttatactaaaatatatttttgtggatgcaataaatagaaaaaaaaatttaatccaaaattaagtttaggtaaggccaggcacagtggctcacacctgtaatcccagtaccttgggatgccaaggcttgcatttctgtaataataattgacattgataatttcttaatgtatctgttggtcatatgtatgtattttcttgaaaaatatttatgcctcttgctcatttgtaacagttatttgttgtttgttgtgtagtcatttaagtttctgatgtatttttgatattaaccccttgacacatgtatgatttacaaatattttgttccaatttttagttgacttgttgattgtgtcagattctgtgcaacagcattttaatttgtagtaatctgactcatttgtttttccttttcttccctgggatttcgaggttaaatttaaaaagtcactgcccaaccaatgttatggggcttttactctattttttgtagtagtttccagttttcaggccttacatttaagtgatttattttgagtggccaggcacggtgcctcagcctgtaaagactgtaatcccagcactttgggaggccaaggcaggcagattaccttaggtcaggagctcaagaccagccttgccaacatgacgaaaccccgtctctgctaaaaatacaaaaattaactgggcatggtgacacccacctgtaatcccagctactcaggaggttgaggcaggagaatcacatgaacctgggaggcagaggttggagttagctgagaaggcaccactgcagtccagcctgggcgacagagtgagactctgtctcaaataataataataataatttattatgagttggtttttatatatgacgtgagatgatagtctgattttattactctacttgtggctataacattttctcaacaccatttattgaagatactgtcctgtctctaagaaatagtcacctttatttaaaatcagttagctgtaagtagatggatatatttctggtctttttttttttttcctgctccattgccctatgtgtctgtttttattcaagtaccatactgtttttgttactatagctttatagtatatttcaaagtcaggttgcatgatatctttacttttttttttttttttttttttttttttttttgctttatttggctattcagggtcttttgtattaccatataaattgtagatgtatttttaaaaatatttattatgtcactgggattttcattgagattgaattatatctgtagatctttttctgtaatacaaatatttaacagtattaatgccaattcaggaataagaaatgttttttattcatgtattaatttctttctttttttttttttttttttgagacagagtctcgctctgtcgcccaggctggagtgcagtggcgcgatctcggctcactgcaagctccgcctcctgggttcacgccattctcctgcctcagcctcccgagtagctgggactacaggcgcccgccaccacgcccggctaattttttgtatttttagtagagacggggtttcaccgtgttagccaggatggtctcgatctcctgacctcgtgatccgcccacctcggcctcccaaagtgctgggattacaggcgtgagccaccgcgcccggctattcatgtattaatttcttactttaatgttctttagagtataatgtaaggtgtttcaaatttttggttaaatttatttcaaagtatagttatagttattgagatggaattgttttttaattcattctgagatagttgtcagtgaatagaaattctgacttttggatgttgcttttgtattctgcaagtttaataaatttgtttattctaataggttttagtaaagtcttaggcttttcttatgattatgcatagagataaaatattatataggaataatttaactttttcttctcaactggatgcttttgattgtattcttcaatatgtctttcttggacatttagtactatgtttagtaagactgaagaaatggcacattgttgacttgttttagatcttagagtaaaatcttacatttccttgtttagtatgtaattagctctgcattttttgttatatgtgacatttattggcttgaggtgcctttttcctatacctaaatttttcagagatttatcatgaggaaatgttgaattttgtcaagcttttattctgcatctatttaatgttaaaaatgtaaaatcacaatgaattctacataaattgaaaagttttcaaagactattatgaacatctctatgtatgcaaactaaaaaatttagagaaaactgataaagttttaactatacacaactttctaagattgaaccagtaagaaccagaagtcttaaccagagcaaaaatgtataaaatatataatgatattgaataagtaataaaaaagtatcaataataaaaagccttgtgtgatataaactcacagccagattttaccatatatacaatgatgagttggtactaagcctactaaatgtattccaaaatatcaagatgggattctgccctaacttgttatataaaatcagtatcgtcttgataccaaaatatagtgaagacataaaaaagaaaactacaagccagtatttttataaacattgaaacaaagttattcatgaaataatagtcaactgagtttataagtaaatccaaaagttattttgccacaatcatgtgagcttcattccatgtaaggatgttttttcacatgtaagtcattaagtgttcttcaccatgtaaagataagccaaaaattatatgattaacacaatagatgcagaaaaaacattcaagaaaatttaatattgattcatgaaaatattctcaacaaactaaacattgatgaaacatacctcaaaataataaaagccatccatcacaaatcttcagcacacatcatactgaacaagcaaaatctggatgtattctccataaaaataaacataagacaagaatttccactctaagtagttctattaaacataattctgaaagctctaggctgggcatggtggcctttgcctgtaatcccagcactttgggaggccaaggtgggcagatcacctgaggtcaggagttcaataccaggctggccaacgtggtgaaaccctgtctctattaaaaatacaaaaattagccgggtgtgttggtgcatgcctgtagtcccaggtattcgagactgagaaggggaaatgcttgaacctgggaggtggaggttgcagtgagcggacatcacccaactgcactccagtcggggtgacaaagcaagtaaaattcatagggaagaataagaaaacccaaatagccaaggcaactttagacattaaaaaaagagagaaagaaaccctgaaggcttcccattacctgactttaaactgtactacaagctactgtaacgagtgtaacatgattctggtacaaaaatacacatatagaccaatggaaaagagagagccctgaaataaagcaatacttttacaaccaacttattttttacaaagtcaacagaaatacaggagaaataactcctattcaataaatggtagtactgggaaaactagttagtcgtgcagaaaaaaagtagacccctgtctcttcccacataaaaaatataactcaagatggattaaagacttacctgtgagtcttcgagctacaaaaattctagaagaacacgtagaaagtactcatttagacactggcctctggtaaaaatttgtgaataacaccttaaaagtgagtgcaaataaaaatcaaaaggctgtgtatggtggcgcatgcttgtaatcctagtgctttgggaggccaaggcaggtggatcacctgaggtcaggagtttgagaccagcctggctcacacagtgaaatcctgtctctactaaaaatacaaaaaattagccaggcatggtggctcgtgcctgtaatcccagctactcaggaggctgaggcaggagaatcacttgaaccagggaggcagaggttgtggtgagctgagattgcaccactgcactccagcctgggcgacagagcaagactccgtctcaaaaaattaaaataaaaataaaaaatggcatctaattaaagaacttcggcacagcaaaagtaactaaacaaagtaagcagacaccctacgttatgaagtaaaatacttgcaaactgcatacaacaaaaaatatatagaatttattttaaaattaatttaaaaacagacaaatgatatgactagatacttctcaaaggaagacgtgtttccagtaaacatgccaaaaatgttcaacactcctaatcatcttagagatgtaaatcaaaacgaaaatgtgataccatttcacaccagttagaatagctgttattaaaagtcagaaaataacagatttgaagttgtggagaaatgtattatgaagaaaatttatcttcataaattgttggtgggaatgcaataaaatttagccactgtggaaagtagtttggagatttctcaaagaactataaatagaattgccatttgacccatcagccccattattcccaaaaagaataaattttctttgccaaaaagccacctgcactcacttgtttattctagcatgattcacaatagcaaagacatagaattaaaccaggtacctataaaccttagattggatgaggaaaatgaggtccttatataccatgcgatactatgcagccacagaaatgaagtaatgtcctttgcagcaacatgaatgcagcagatggccattaagcaaattaacacagatcagtaaaacaaataccacatgttctcacttacatgtggaaggtgaacattggatgcgtgtggaaacacagataaaatcaataaacactgggaattctaaaaagatggaagaagaaatggagacaagcattgacaaactactttccagtgtgttgtacactacttgggcgatgggattattaagtatccaaacctcaacaccatgcagtatacctatgctacaaatctgcacatgttctccctgaatctaaaatagaaataagatgttttgtggtataatgacatattatgtatctttagctccaagttaatggttggaattagcagtgtaagacagaagtatttacctcttaaggcataggggtaaatgtttttataccaggtctcctacatgttgtaagctatcctctctgaaagctcttggtctatagcccaagaagtgttttattcccaagtgtgcagctgaaataaatgactgtatccttttttaatgtattaactgtagacaagaatatatagttagttactctttttggggataagtggtatgtggtttaatcacttttatttttagaatgaatcatttttttttaatgtgaggttgtggaaaatcatgttaaattactgaataaggaaaatgaaacatttttcttaagcataaaagtcttatggccaaaccccaagaatgatgaaacagagagtgtggattaagaccacactgctgcaacaattctatcacaatcattctggtaaaaacaaaataatgggtcagaaggaatttttagaatacttttttgattctatcacagtgttaaatttttatttgtctttattatttgctatatagaagtctgtacttcagcaaaagatgccatgaatttctagttaatgtgctcacacatattctccctagaaaggtactgctgtgtttacaataaatgtggagcattgattatcttccttgtgctgctatgtttgtataaaaaaagacttcaagtctgactttgcaagtaaagcagagtcaaccctgacttttctagtttcaacagccacagcctctgaaatttagtataatgtcaactatgaataatgacagcatttcaaaactgagaaaaagaaattgataactttatatttttagtttatcatttagtttataaaaatttatagtttctaaattatatgttaaataacttgaacatgcagatacctaaaagattcatttagatgatagtattaatatttaatagcttataattgtgtatcacatttgctgctttgggcttcctggaaagcagttatttagtttctaaatgtaaatggagaaaaggctttctataatcctaatcatacagttcttttaagattagcactatgtttagatttgaataaaattcataggtttgtaagtaaggtaaatgttaatagtttttttctaaaaccaacattttaagtgactgatcagtaatttcaatctatttcattttattaactgagaagccaaattatttaagcaaaataagtattcttatattactctttctagaactttcagaaactaactcaatggatgataatgtacatagagaccacaaatattctatataataataggctcattcttgctctctttctttgcccaggctgttgtgcagtggcacaatctcggctcactgcaacctccgcctcctgggttcaggtgattctcctgcctcagcctcccaagtagctggaactacaggcgcatgccaccacacccagctagttttttttttttttgtatttttaataaggatggggtttcaccatgttgatcaggctgatcttgaactcctgacttcgtgatctgccccccttggcctcccaaagtgctgggattacaggcgttagccaccacgcccggcccattctagattttaatataaaaaatatatttcaaaagtaaaattggtgtctgctcttttaagccatgagaggaacaccattgttagaatctatttaccaaagtgcattaggcttagtaataagtgctttacgccaaaaatcaagttctacctactatctaagggtaaagagaagtagttttaaaattcctatgtatttctactaccctaaaaaattaaaagccaaaatgttaggaataaaaagcattgcatgaaatggtgttaagcataaagattaaaactgaaactcaatattaggtggtgctgtagcaggacaagctgtagacaaacccctctgacactgagttaaagaaggaagggctttattcgtctgggagctttggcaagactcacatctccaacaacagggctccctgagtgagcaattcgtgccccttttaagggcttacaactctaaggggatccgcatgagagggtcatgatcaattgagcaagcagggggtacatgactaggggctgcatgcactggtaatcagaacggaatagaacaggacagggattttcacaatgcttttccatacaatgtctggaatctatagctaacataactggttaggtcatgggtcaatctttaaccaggcccagggtgcggcgctgggctgtctgcctgtggatttcatttctgccttttagtttttacttcttctttctttggaggcagaaattgggcataaaacaatatgaggggtggtctcctcccttattccccccctttgagaatctcactcaatagtgggggttctcagttttattcttattacccatgtcttcttgcaagacagattgatagtgattcatatagtacacttgtgctgaagcattttgatgaactaaggtagtgataaagctttctatcatttgaagaagtacaggtagcaaacaaaggagcagtaagcaggtttccattactattataactcctattataacagttttaaatctttttagcactggcaaccactttccaaacatggccccaggattaaatccatgccacacttgcacaggcacatgtgccagttttgtcatatttctatgtcttcaactacttgcccttgatcatctatgtgaagacagcaattagtaaggttaaattttctactgaccccctccttcagctgctagcaagtagttgagagccaatctattttgatagatagcatttctcatcgagtttcttgccaggccagaatagtcaaggctttgctggtcttattagtgattatttttaagacagcttttaaccatatgatttggttgagcatgtaaatggaggtctggtatccccacgagccgtcttgtggccaagtagcaggcccataatattgtatgattctctcagggggccattcattatctttcctattttctatagctatgattctcttttcgcgggaagcatagacagggaagcccaggagttcacctgtctttatgggcagtaggaagaaagatggtttaatagtgccaataacacaactacctgcccactggtcaggtaatttggcataaggtctatgcccacatatccagtataatccagtgggtccagtcctggtgggactccgggtgggtctacacagtttgcaactttgggaatttactaaatggatttttcttaatatggtttgaactatattaggtggctgtttttgtagtactattatacagtttttgcccaaggcagctgagtcttcccacaggatgggtgaagtccttcccaactcttgctatacagtattgtctaatgattgaggcttttaggacccagaagttaccagggtgattcttttgagccaggaatttatcaggaactgggtctgtgggtactaattctcgggcttcccatggccattgatctcctgttatagttcctccacatacataacatgaagtgacattgagagactgggctacatgcttggctaattgcaaaaacaaatttcttgtttttcctggaatttctggtactggcacattcagttcgtcatagaaggtttgaaatactggctcaggagagcatttataaactcctcaaaccatgatatttatttgaggatccaattcagcttcgtcgatttctagggttacacattccccttttttccagtgaggattaagggggttggttattactagttctaaggggttacagtgaccactggtagaggaagggcactttatcctttctgaagctggacaggattcttttcattttttatccaagtagcctaaatgacacaagatcagtatccacattcatttccacacagtcctaattcatggcaaatgtacttattttctgccatatagcctcttctttaaattaagagaaccatatcctcttcctaacataactattagtgacagcacaggcatcatatttcaaggtgacttgtttgggcacccctttttcttctgttttggctaacactttacttgtatcgtttatgagcccccaccagtcctcagtccttaatcttattttaaaaactgtggtcggctgggtgcagtggctcacacttgtaatcccagcactttgagaggccaaggagggcggatcacaaggtcaggagatctagaccatcctgctaacagggtaaaaccccatttctactaaaaatacgaaataattagccgggcgtggtggtgggtgcctgtagtcccagctactcgggaggctgaggcaggagaatggtgtgaacccaggaggtggagcttgcagagagccgagatcatgccactgcactccagcctgggcagcagagcgagactccatctcaaaaacaaaaacaaaaacaaaacaaacaaaaaacaaaaaaactggtcatggaagtctcagatgggtcataacacacatcaggttagtcatttcctgggctacataccttgtatagaataacattatacaaataagttctttttagagttccagtacacttataataaccacaaaataataggaccgtagcaatcttttgtcctacctcagtgacttgaagtatacactgggaacagtcctcagtatgaggaaggtcagttgaagtccttactgtaaaagtccaaattttaaggaaaatgagtcctacaatgagttttctcatgcttcggccatgcgtggaccagtcagcttccaggtgtgactggagcaggtcttgtcgtcttcttcagagtcactttgcaggggttggagaagctgctcccgtccacgtacagctcccagtcaactaatgttcaaggatagtctcagaggttgggcctgctagaataaactgagtccaacacctctacacagttatgttcaactgcactctctgataccgggagcaaggtggcggggtttagggtgttgcaaacttcaatggttatgcgggaattttcacagagcaagctttggtacttggttaatctaacatttgttaaccaatgatgtcctttggcagtcattaaagttaccacagcttgggggggcctttatatttaggttttgcccaagggttagttaatctgcttcttgtgctaacagggccgttgctgccagagcccttagacatggggaccagcctttggaaaccccatctagttgttttgagagataggccactggccttggccagggccccacagtctgggttaaaactccaactgccatttttttctctttctgacacataaggtataaagggttttgtcatgtcaggttgccccagggctggggccaacatgagtttttcttttaactcatgaaaagcttgttgctattggctgtaatagatgtagtttattcaatctacatttttattaactgccacccaccaaaatattgactcatatgctgcagctatttgtttttaagctttaaattgatctgatattccccgtgggactccaattgcatttaatgaacgtgagagtcgatagatccataaggggcttctctcgctttacaatgtcttatttttcctccttctggttgatgaaatgccagggtgaaagggatagccaactggactaaagtataagtgccactccagttattcggcagaatgcccggtaaaggtctaccacaataccaccacacatccactcagggatgaacaagggctgactgattgataagctcttgaaaattcttaagctcactgcatctcttcgggtctccaaggaatgctaagtttcctccctgtcatgagagacacaaagtgaacttaatgttgggagacagaagctggatggcccttgggtgtgacccgaagggtactggacttcaggatatagcagagagagagcttggcatgacttgttacttcaggctgtagaatcctggaaaacagctacaatggagcccacgcctagtcgactggaggaccaccctagtggaaaggggacaatctgggcctctggcctgccatgcacacaagcataacaattgcttttgtttaacgtgcggatggaatatttgatctattccaaccagacatttgcatcttggtatcctgtcttaattgccaaagtttgttttaagtctttaaaacaagatgatcctctggtaaaatgatcctctataaggaacatagtaaaatgaatctatgattttaggaagttataaaaatcagttagggcagtccatccttgctctttagtggtccaaagaacgttggaccaactatggcataaaagttctacattggagggcaagactcctggttgacaatggagtctttatcaaaatttccccagattaaattgtcctaatttactaatgcccagactgaggagagtcaggagggacagaggtacttttctgaagtacagacctgtctttgacttggcaagtccccacagggtataacaaggtaaacattaaatgcaatagtttgaggcaaaattgacttggttatgttaataactagatggtcagcaatagagtgaggaaagaagaaagagtaatagaacagatgaaagagttaaatttttctaagctttagtttggtagggtattcccctgggactatggcccatgactctggagggggtggtgctttcttgacttgggtgtgatgagtccatcatttttacactgtatgaacagcagtcttggtggttagcaacacaaggtagggtccttcctaggctggctcgagtttccttttttttttttttttcaccttttgatgagaatgtgatcttcaggctggtgctagtttaccagaaattctaggggtggtacatgtgctaaaagagttttagttttgagggaaagtggaagataaatcaagtatataatttttaagaaattgaccttttgttttaaatgtggggacatcagcagtggactttatagtccttggtgcctttctactgagaaatttcctttagcacccatttttttaattagtttttagaccaaagaagccaaacaccattttatatttgacaatgcttcctgcatgatttttataccagataagctaaatgtcacctttatattagtgtgccattaatgttaaacttagttttaataaaactttgtagacatatttattcaatttttaatgtcagaccataaagtaagatttttatagactctttttaaccttttataatttttgttgaagagtaggttagtgctttaagaaaaactcattgtgtttatactttaatttcctgttcacagaaaaactggatgacacccctttaactttagctgatgtttacacacagaattttctttacaattaacgtttcaaaacttgcttaaaccttcaaaacaaattttaaccttttaatgtaggtaaaaatccacattcttatgcctccttataatccttttaccaaaggtatattttacctttcttatggaccttgcacataaactgtttcttcaatagtactcaggaggccttattatttttaaattatacaacatttcttgcataattttttttttttttttggtatatattgatcattcttgggtgtttctcggagagggggatttggcagggtcataggacaatagtggagggaaggtcagcagataaacatgtgaacaaaggtctctggttttcctaggcagagggccctgccaccttccgccttccacagtgtttgtgtccctgggtagttgagattagggagtggtgatgactcgtttaaccagtatgctgccttcaagcatctgtttaacaaagcacaacttgcatcgcccttaatccatttaacccttagtggacacagcgcatgtttcagagagcagggggttgggggtaaggttatagatttttcctagtacagaacaaaatggagtctcccacgtctgcctccctctacacagacacaacaacaatccgatctctccctcttttccccacacttcccccttctccattcaaccaaaccgccattgtcatcatggcccttctcaatgagctgttgggcacacctcccagatggggtggcggccaggcagaggggccccccacctcccggggcagccgggcagaggggctcctcacttcccagatggggctgccgggcagaggggccccccacctcccagacggggtggcggccgggcagaggggctccccacttcccagaccgggcggctgggcacaggcgccccccacctcctgggtggggtggctggccgggcggggactgccccccacctcccggacggggcggctgccggtcggagtcactcctcacttcccagacggggcagctgctggtcggaggggctcctcacttctcagaaggggcggccggtcagaaacgctcctcaccttcaagatggggtggcggcagggcagagacactcctcagttcccagacagggtcatggccgggcagaggctctcttcacatctcagacggggcggcggggcagaggcgctccccacatcccagatgatgggtggccaggcagagacactcctcacttcctagacggggtggtggccgggaagaggcactcctcacttcctaaacggggtggtggccgggaagaagcgctcctcacttcccggattgggcggccaggcagaggggctcctcacatcccagaccatgggcggccaggcagagacgctcctcacttcctatacagggtggcggccgggcagaggctgcaatctcagcactttgggaggccaagccaggcagctgggaggtgtaggttgtagcgatctgagatcacgccactgcactccagcctgggcaccattcagcactgagtcagcgagactccgtctgcaatcccggcacctcgggaggccgaggctggcagaccactcgcagccaggagctggagaccagcccggtcaacacggcgaaaccccgtctccaccaaaaaatatgaagaccagtcaggtgtggcagtgcgcgcctgcaatcccaggcactcggcaggctgaggcaggagaatcaggcagggaggctgcagtgagccaagatggcggcagtacagtccagcctcggcttggcatcagagggagaccgtgcaaaggggagatgaggaccatgaaaaagggagagggagagggagaaggagagggagagggagagtgcataaattttttttaacatttttctctttcacaacttttgcagacaattctttgacatgcctcaactttctgacttattacaaatatttctttctttaaacaaccagttaatttatttcaggacaataatttaccatataacattctttttacagaaattctgccccccacttttttttttcgaagatgataaccattcttttccaaagcgaacttcttttatgtctgtggactagaccatctaaggccacaagattagaagttactataatacatgttacactgttaacttttagcaaattttacttttgttgaaaaccttgtaagtttgggatttcaattatcctttgctatcaataagaccttgtttagtccaaatgaacttagaattggtatagataggtttttttttttttaattaccttggaggaatcatctatcgtcctgtcatgaagggagttcctcctaggtctggtcggaattttgtatggtaattaagatttagatcccctgttagggaacctgctgggttaagggaattttcagtggttaatgttaaatcatctttttttctttttttaggatacttctgaactggtgagatgtgctcaaaatgaggtttcctctaaaagttatttttctactttcttctgttagcaaagcagttgccactacagattgaatgcatttgggccatccacagattactaggttaaggatttttgataggaaggctacacaggttgtcagtggcctcagtgctttcaggctatgcccttgtttacactgacaacaaagtgatattggagtgttgtagggttatggagaatacctttaattatcaattataggttttaaatttaccttggcttttaaaggaatagggtacactgtttgtttttcttaacaacttgtatatctttctttctttctgtctttgattttctgtctctttttctctttgactttccttttgcctctgtctctttctctctctctgtctctctctttctctctctctctctttccttgactccctctttgtctctctgtctcttcctctttctctctcctggtctttccctgcctctgccagctgcttatgctgctgttctctcaaccactgtgggggtagggtgggggtctaaaaccagccgtgagcaagtgtctatgtacggcaactggtctgggtgccctggcttacaggttaccttgtgccatacctttgaaacaagggacctgtccaggcttccttctgatggccaacccacttctaatgctgaccagtctatttcacacaaagttctaagttttcctgctctcatagtaacactctaatctcccttaaatcctttctttaaatttttcaacatagttcctagtggggtgggcttactttgtgcctgacccatgcttttttgagacaaaacaccacgctcacaccacacacacaccacaaaacaaagaatgtgtaaaaagggcacacatacacttttacagtttacacaaaaccagaatcaaaaccaaaatcagagtatccagaaatccaagccaggtcgaaaccaaaaccaaagtatcaagcaatccaagtcaactcaaaaacaaaaaccaaagtgctggtacaggcacactgtgggtgatcagaccacacttccactcaaatggagtgggcaagttccaaaaactagtcttaccaagtttcaggtgtccagactccaagtgccagttccttcccggtgttcagccactgcgctgatcctccacaggggcatgccacacactgctctggtgaggcgttccactggagtaattgcctacctgggagtgctctcaggatccgcgtcgctcaagctggctgcagtctccaacagggatgctccacagggcaggcctaagccacctaaagggctgcctcgaccatctgttaatcactttgcttcctggttggggaaccaagaaatgtagcaggatgagccacagacaaaacccctcagacactgagttgaagaaggaagggctttattcagccaggagctttggcaagactcaagtctccaacaaccgagctccccaagtgagcaattcctgtcccttttaaggtcttacaactctaagggggtctgcgtgagagggtcatgatccattgagcaagcagggggtacatgactgggggctgcatccactggtaatcagaatggaacagaacaggacagggattttcacaatgcttttccatacaatgtctggaatctatagataacataaccggttaggtcaggggtcaacctttaaccaggcccactggcgccgggctgtctgcctgtagatttcatttctgccttttagtttttacttcttctttctttggaggcagaaattgggcataagacattatgaggggtggtctcctcccttggtgcctgattgtatctcagttctcccacttatgggctgtatgacctaagtatagtttcttgcctgtctgtgcttggccctatagtggttctgtgagaataatagtgcctacatcctaacgttttgtttaaattaaagcaattaatgcaaataaaggtgtcagaaaaatgcccagcacataacaagtgtacaggaagtttattagctcttatttgttgattctgttagatcatgacaaatgttaagcctgaaaacaagatggccataccactggtttgtaacccatgttccttctaatttgtccgtctggggctataatagtagttgaatgtttttaatactaaccttggcaaattcccatatattcacatacagcatggatataaatatctttaaaagatttatcattgagtactgctctttagcactccagtaaatggataaagaggaacttaaatggtgagtgtttgtcagttttattcattagagaatgaggcaaattgtttctttatctacttgtttaatatatttcttatttattttcatttgatacatttaaatgtagtttgaaaatatatatttaaataacttttttctctaacaaatgaagaaaatcatttatttataaatttagacagaattttactctaaactgttgctttagattttttttaaggtattagatcattaaaaatcagcatactttatttctgagtgtgggttcagactattcatgatattaaaagtttacttacatcactacatgagcaagccacatgaaataaaaaaatatgtatatgtctcctgaaattttaaaatgaacaaacactttattctctggcccaatttcttaaaatttctctctttttttttttttttttgagacatagtcttgctctgtcacccaggctggagtgcagtggcatgacctcagctcactgcaacctccacctcccagattcaagcaattctccctgcctcagcctcctgagtagctgggattacaggcgcccactaccacttccagctaatttttgtatttttagtagagatagggtttcaccatgttggctaggctggtcttgaactcctgacctcaggtgatctgcccactttggcctcccaaactgctgggattacagatatgagccaccgcacccagcctctctctcttttttttttttttgagatggaatttcactctatcacccaggctgaagtgcaatggcacaatctcagttcactgcaacctctgtctcctggattcaagtgattgtcctgactcagcctcccaagcagctgggattataggcacctgccaccacactaggctaatttttgcatttttagaagagatggggttttgccatgttggccaggctggtctccaactcctgacctcaggtaatccacctgccttgggctcccaaagtgctgggattataaacgtgagccaccacacccagccttctcttatatattttttatagtattaatagtatttttgattggcaaataagagttgtataaatttatgggttaaaatgtggttttaatatatgcatattatataatatgattaagtcaagttttataacatatctgtcaactcacttatcaatcatttcttatgatacatttgaaatttactcagttttttaaaaatatagtactttatagtttactatcatcatgctgctgtgcaatagatctcaaaacctacttaccctgtctttttgaaattttgtaccctttgatcaacaacttcctatttacttcccaccacacctaacctctcataaccattatttcattttctacttttttgagttaaactttattagattctacatataaataagatcatgcagtatttgtctttttgtgtcaggcttatttcatctagcatgatgtcttcaaaatttatctatattgttttaaatgatgggatttatccattgttatggttgactagtgttccatcgtgtatctataccaaaattttaaaaaataatttaaatatatgtatattagttaataactaatattaatttgttatttacataaatatatatttatctcttggttgaaaaactagtgtgttatgagaaaatatttctttgttaaagcatgtatcattgtaatttagcatataaatattttgttaataatagctcatttgtaccaagcactaaccataacactatatgtgttaataaatttaattctgacagtaatttaataacataagtatactaattatcattatttcacagtggaagaaagagagccactgagagaaatgactcactcacaatagcagagcccatattaaaatacaggcaactttgtcttaaagataactcttgagtacaaccataaaaatctttcaaacagataagacaaaattacttttaacaattatttttcagaaaaactaacataaattgaataattggataaattgtcattgttatacgtgtgtgtaaatgtataaaatggtacataaaatagaaataatttaagctagaaaaaagatgttaataattattatgaataaaatggtgaggtagtcaattattatttgtagatgatatctttgtttacttagataacaaaaaaactacaagactactttaaatgtctattcaggtgggtaggcaaaattttaagacgatcacctggattttcagtctgttgcacacctgctgtgtaatcttcacctctgaagtgtaaaaaacaagtgtctcactgtggtggaaaattacttatgaaattaggttactaatgtgttgactctgtgttcatcaaaagggagattaccctgattgggctaaacttaatgagaggtacttttaagagaaaaagacacatcatagaaaaatacccctgctgacctggaagtaagtgacttctaggtcaaccaatttgtaaactgcttatggtgaccccatggcaggaaatctatttgtatattgtcagaattcctgccttccacatgatgcttccagtaggaagagaaaaaggataccatgacaagttaaaaaaaaaaagggagggggctctcttttttcaagaaataatcacctctcatctgggatagcttaatataaacagaggagaccacaacatgagcacatcgatgagaggaaaaaggcaacctggttgaaagggctcactgacatgatggagcagcatttactaagtcacagtgaatgattagcctctgggatagcaatagtccgccaagaagtctacactcattcttatactgattaaatgagcatatccgtgccattctggaggcccagttttacactacatattacagaaataacatagagaccagtgggtaacctcctagaattaaacttcttgtgaaaaagcatatcttattgttttcacaattgaaaaaccttgaaaacataatgaatttatataataaatgtagtaatacagatgtttattgttgcgggaagtcagggacgccaaatggagggaccggctgaagccatgacagaagaacgtggattgtgaagattttatggacatttattagttccccaaattaatacttttgtaatttcttatgcctgtctttactgcaatctctaaacataaattgtaaagatttcatggacacttatcacttccccaatcaatacccttgtgatttcctatgcctgtctttactttaatctcttaatcctgtcagccgagaaggatgtatatagtctcaggaccctgtaataattgcgttaactacacaaattgtacagcatgtgtgtttgaggaatatgaaatgtgggcaccctgaaaaaagaacaggataacagcaattattcagggaataagagagataaccttaaactctgacgccggtgagccgggcagaacagagccatatttctcttctttcaaaagcaaatgggagaaatattgctgaattctttttctcagcatggaacgtccctgagaaagagaatgcacacccaggggtaggtctctgaactgggccccccagggcgaacctgtctcttatggtcgagattgcaggggtgaaataaactccagtctcccttagcgctcccaggcttattaggaagaggaaattcccacctaataaattttggtcaggccggttgatctcaaaaccttgcctcctgagaagatgttgtcaatgacaatggtgcccaaagcttcattagcaattttaatttcgcctcggtcctgtggtcctgtgatctcgccctgcctccacttgccttgtgttctattaccctgttaagtacttgatgtctgtcacccacacctatttcgcacactccctccccttttgaaaatccctaataaaaacttgctggctttgtggcttgtggggcatcagggatcctaccaacgtatgatgtctcccccggacacccagctttaatatttctctcttttgtactctgtccctttatttctcaagccggccgatgcttaggaaaatagaaaagaacctacgtgattattggggcaggtctcccgatagtttataataataaactgctaattttagaagattctactatattgtcatacaatattgaactttaaacaccttaatatgaatatgtcttgaatgcatgaacagctatgcaggtagtttctcttagattaacatgataaaagtaacaattagagaaaacatttagaatgggataaaatttatcaaaaccacattttttcaatggcttggcataattgtcatgcttttggaaatggctagattactaacaagaagcaaagacaaaatcatggctttgccaaatgattaaattcttgaccatttaaaatctaaaatcttgttatgccagtatagttatttgcataagtgcaataagaatctgttttgttttgcttttttgagatggaatctcactctgtcacccaggctggagtgcagtggcatgatcttggctcactgcaacctccgcctcctgggttcaagtgattctcctgcctcagcctccaaagtagctgggattacaggtgcctgccaccatgcctggctttttttattatttttagtgcagatggggtttcaccatcttggccaggctgttctcaaactcctgacctcataatccacaagcctcagcctcccaaagtgctgggattacaggcatgagccaccacacctggcctaagaatctgttttcttttgtgacattacacaactggaaaacttggttattttaccaaggctttaactggaatgttgtgctttcttttaaggaatcaaacttgacttaggaaaccaataaatcccttggaaactggcctcatattttgtgtacacagtcccagtgcagggtttctgatctgtggtaagtaaagaatgtcactttctagcaggctgggaagtccaagttatcttggaacctcaagaagagagaaattcactcaactcataagtatttgatggtacaaatccgtggctaggcttggctgtaaaaaggtcttatctcagattccttctacaaaacaaagttccatcaaagccaatttagaagacctatgtaacaaataattattcttgctgcaccgtatgcaaataattaagataactataataaagcaaacccatcctaccatgattagtcttctaataaaaatgggaaactggagagagaaaattgtttcaaaaactacagcatgcctgttgttatattctagtcttgcctaacgttttttatttttattattttatttattttatttttattattttctaccgtttaaattaaattctaatttttctgactacaatttccaaaataagctgtgttttcttaaagccctatgaatggaaaactaaatgtttcagcaggcgctgcctctgagcccccatatcatcacaggaggaaatctcttcactgttagtactgacaactaataactgagtgtgcccagaatccttctccaccacatctagtgagtccatggaacccagggtaattcagagagtatctgttataggaatcaactcctggatacatcacacataagtcaaagcctggaaagatgaggaagcaacccctgatagcccaaaggaatgtcctaaatatcaatataaagaaataggaaatcttaagctgaaaatagtaaaaaataagtaactgagtgagaactactcatcttactcagtctcacccctaccttaccaaatactttttgtcattcctacctcaaatattaatgaggcagaaatttaaaaataataataagaataagtactgcatttattcactactagaaaagtaaaagctaagtctcagaatgtggcaaggcaagggttaaaaggaaaaagaaaagaacaaattttcctctgcctagcaagctcacttcaaggacagttgtaagttaatgctgtctgaatagccaaggccaaaggaatgggctccagacacccccccatgcccttccagagcaaggttgaaggaagaaaaagaaagacggattcttttactgttactcttttcccaggcttcttaagcattattatgttttacaaatgtctatatttagccaggtcttgtttttctttcaatgcagctacaaggccaccagctatgcaaggtcacaagttatgttatgctataggttacatgacctgtcactgtatgactaactgcttttgttttgcttctgtaaggccacttataaaaaccccactctgtctttgttcaatgctcagctttttggatgtgagtccactgagccagtgcgtacctaaaataaacaacaatcctcctgtactccatattggtctctctgttcctcagtttaccacaacaataaaactttttaattaaaattattattattatttttttgagacggagtttcattcttgttgcccaggctggagtgcaatagcatgatctcagcttatcacaacctccacctaccgggttccagcgattctcctgcctcagcctcctgagtaactgggattataggtgtgggccacccacccggctgattttgtatttttaatagagacggagtttctccatgttggtcaggctggtctcgaactcccgacctcaggtgagccacccacctcagcctcccaaagtgctgggattacagacatgagtcattgcacctggccatgaaaattatttactatgccaccttgtgggaattgctttacttactctactatttgcagtaggactatatgctgtagcgccttgagggtggaatattggacagagaatatcaattactgtagcattttgcttagttattatcctcacggcaggaataatggttaccaataaaaaataacacatgggccttaccaaacatgcacctctgcctctcattaggtatgcaatgttgtttctatctcaactaatctggcctagtaagagacactgctgaaaacttaaaggactaaaaagctaaggtaataccaaaacaaccaaatagattcttggtttggaaacaaaatcatagcatgggtcatcccattcctgggccctctcctaataatatgcctaggactaatgttcttatcctgcctagttaaaatttttcaaagatttgtaactgacaggatcatggccatttcacagacaattaccccaaaacatctacagatggcattactcctgcagtctatctgagacctgaaaactcttggtccccttgtcagcaagaagtagccagaaagaacatgccacccctcatcctttttataactacagggtctggattaatagagcaggagcttcaccatcttggacaagtactgccatttttcacctcaatcaataactgcctaaatccaaagggcatcagtctaatgactaaggtcagcatgaccataaaccacaaataacatctctgaccagatactctccaaacccctctataaccagaaacaagccagccctgagataacctcccccctggctggagagatgtcagccccaaaataacctcccctctgaccagagacattctaaccccgccataaacttctcccccacacagaaacatttcaaacctgtgataagctgtctcaccttgaacgcttaaataatcttagtctgtaagagaaagtgctcctgaacaaaaccagccagaagcccctctcagacctgtctttgactgttgagctgcttttcatgtttctttcctctttctttaactcttacagtgactaatataaattattaaaataggttaggaacatttttttggctctccctctccctctccctctccttctcccgacggtctccctctccctctctttccacggtctccctctgatgccaagctgaagctggactgtactgctgccatctcggctcactgcaacctccctgcctgattctcctgcctcagcctgccgagtgcctgcgattgcaggcgcgtgccgccacgcctgactggttttcgtattttttggtggagacggggtttcgtgtgttggccgggctggtttcctgctcctaaccacgagtgatctgccagcctcggcctcctgaggtgccgggattgcagacggagtcttgttcactcagtgctcaatggtgcccaggctagagtgcagtggcgtgatctcggctggctacaacctccacctcccagccgcctgccttggcctcccaaagtgccgagattgcagcctctgcctggccgccaccccgtctgggaagtgaggagcgtctctgcctggccgcccatggtctgggatgtgaggagcccctctgcctggctgcccagtctggaaagtgaggagcacctcttcccggctgccatcccatctaggaagtgaggagcgtctctgcccggctgcccatcgtctgagatgtggggagcgcctctgccctgccgccccgtctgggatgtgaggagcatctctgcccggctgccctgtgtgagaagtgaggagaccctctgcctggcaaccgccctgtctgagaagtgaggagcccctccgcccagcagctgccccgtctgagaagtgaggagcccctccacccggcagccaccccgtctgggaagtgaggagcgtctccacccggcagccaccccgtccgggagggaggtgggggggtcagccccccgcccggccagccgccccatctgggaggtgaggggcgcctctgcccggccgcccctactgggaagtggggagcccctctgcccggccaccaccccatctgggaggtgtacccaacagctcattgagaacgggccatgatgacaatggcggttttgtggaatagaaaggcgggaaaggtggggaaaagattgagaaatcggatggttgccgtgtctgtgtagaaagaggtagacatgggagacttttcattttgttctgtactaagaaaaattcttctgccttgggatgctgttgatctatgaccttacccccaaccctgtgctctctgaaacatgtgctgtgtccactcagggttaaatggattaagggcggtgcaagatgtgctttgttaaacagatgcttgaaggcagcatgctcgttaagagtcatcaccactccctaatctcaagtacccagggacacaaacactgcggaaggccgcagggtcctctgcctaggaaaaccagagacctttgttcacttgtttatctgctgactttccctccactattgtcctgtgaccctgccaaatccccctctgtgagaaacacccaagaatgatcaataaaaagaaaaaaaagaaaaaaagaactttccaactataaaaaataaataaataaataaataaaaaataaaaaaaagaactttttttgtacaacatataatcctgagaagacaatcaaaactttatgtacattttggctacctgaagggccatctaaacatttatacagaaacatttatttaactgtcactgtgttttttgtttcttgtttgagatggagtctcactttgtcacccaggctagagtgcagtggtgcaatctcagctcactgcaacctctgcatctccagttcaagtgattctcctgtctcagcttcctgagtagctgagattactagtgcatgctaccattcccagctagtttttgtatttttagtagagacagagtttcaccatctttgccaggctggtctcgactcaagttctgccaggccaaactccacccacctcagcctcccaaaatgctgggattacaggcgtgagccaccatgcctggccaattgttacttttaatgcatgtcttctgttagtataaaagctttctcatgcaagaagtttgatgttacaacaatagctaaaagaatattagaaaatatgttttcctcatggaacatttctgaaaaagtctcataggataaagatactcatttcactagacaagtcgtaaaactgttaaataaggcattaaagatacaatattattgagcaaaactaaattgactggattgcctttgtagttgcagattgatgacaatcagatctattaagagtggaaaaaatgtgttgacccttctaaaatagttactggaaagcctatgcatgtaataatagaacctcatgtatcttctgctactgaagtctattattactaaatgcagcaagtccttaatccattatgacaaagcatattttcacaaggtaaataaagctttgcttttttttttacagtctcactctggcacccagggtgcagtggcatgatctcgactaactgcatcttccacctcccaggttcagtgattctcattcctcagcctccagagtagctgggattacatacatgcaccaccactcctgtctattttttgtatttttagtagagacagggtttctccatgttggccaggctaggctggtttcaaactcctggcctccagggatccacccaccttggccaccaaaagtgcagggattatagtcatgagccactacacctggccactacttactcagggtagtaaaaccttttataatctaaaatcaagacattgagtctgcttgccatctacactgcagcaagacttggacccttgaaatttgggtttataatgtcacaactcagaagaacccctctaaactcttgcgattgtataccctttggagatcttaagggaaagctaaccagagaagtttatctttaaaaacaaatggcaactttgatatagatagctttttttacaagatcaaaaatgaagacatgtctgctattatgacactcttagttgacaaatttttttctcatggctccacaaacaacagaaatcaaaaagaaatctctcatgtgcactcatgggggtattcttttatatgtagagaattttgcagccagctttacatatgaggtttcttacccacattaagaaagaaattttaatgagacatttgctgcctcataatatcagaaacaaaatattggtctactgctcttaacctacttcataacttaaagggaacttcttcagaataggttaaagagcattgccaagggccattcgacttctgaatgggcattgtttgttaggttctccccacaccccgcatggagtagagtaaatgaggcaatgattagaaatgtattttccataataggctctataacagattttactgcaaaggctatggttatacaatagactttaaattttcttactaaagttttgctaaataatagaatttctctaaattactgaataaacagaaaagtatctgtgcagttgctaatatttgtagttgcacatggagaaatacattaggtactacatagattaaattgcaggggattaataaagaggctgctttgtttaaatgaatagaacatttatctaactaattatttgatctatttaattttagttggtttgttcatggggaccctggctaaaaacatacttcaaactcttggtgttatcctctttatagtaaaaatggtagtttctctgccacactctattctctcaaaagttataaatgtttgaatgcagtcatctgtacaatatcagatggtctatgtttaactggaatgaaaaaacctcaaaggcacatacgaccatgaggacaccataacctatgaatgacatggtataaaaaaaaaaaaaaactcaaaataatgaaaactgagagtggcactacggccctgaattttggtcacactcttacctacatgagaacttaaccaaaatgggaggaggggatatctaaaataaaattactggaggccttcattctgaactaagcttgtgcactaggcacagagcaaaccaaaatggagtcacttatgctaaatgtgatgtaatcaaacttaaaatttaagaaaatagattctaaaacaggccaagttttgttttctgtaaacagcagatgtaaacacaaggaggtcccctctattgtaattatttaaaaaaataataacctgaagtcgttgtttccacttaaaaaacccacagttctggtatttcacagtggaatttgagactaaataagtacatttttgatggtgacagagaaatatcaatgtctaaagtttggatctgtttctcaaaattgagaaaataactaaaaaagagaaaatgttaattatagcctaatgctgccccctttcatgtttaattttggtcaataggtcattttgtacacagtatactaaaaccacaccgtatatgtaagtagactgtaacccattcttgtacctgtcaggcctctgagcccaagctaagccatcataacccctgtgacctgcacgtatacatccagatgtcctggagtaactgaagaaccacaaaagatgacattccaccattgtgatttgtgcctgttccaccccaactaatcaactgaccttgtgacattctcccctggacaatgagtctcatgatctcccaaccctgcaccctgtgacccccgcccctgctcacaagatataaccacctttaactgtaattttccactacctacccaaatcctataaaactgccccacgcctatctccctttgctgactctctttttggactcagcccacttgtacccaagtgaaataaacagccttgttgctcacacaaagcctgttggtggactctgttcacacgaactcatgtgacatttggtgttgaagacctgggacagggggactcctttgggagactggtcccctgtcctcaccctcactccatgaggagttccacctattacctcaagtcctcagaccaacccagggaacatctcaccaattttaaatcgggtaagcggcctctttttattctcttctccaacctctctcactatccctccacccttcaacccctcccttccttaatttcggttcctttccctttctggtagagacagaggagacatgttttatctgcgaactcaaaacactggcgcccgtcatggagtcggaaagatagtcttcccttggtgtctaattactgagggggcgcttgcctgattattcacccacattccagaggtgtctgatcacctcagggactcctgccttgatccttcaccttggtggcaagtaccacctcccttacaatttgacttcctcttttcctaattgaatacactttatttccttctcctgcctaattgccctggccagaacttccaacactatgttgaataagagtggtgagacagggcatccctgtcttgtgccagttttcaaagggaatgcttccggtttttgcccattcagtatgatattggctgtgggtttgtcataaatagctcttattactttgagatacatcccatcaatacctaatttattgagagtttttagcatgaagggctgttgaattttgtcaaaggccttttctgcatctattgagataatcatgtggtttttgtctttggttctgcttatatgctggattacgtttattgatttgcatatgttgaaccagccttgcatcccagggatgaagcccacttgatcatggtggataagctttttgatgtgctgctggattgggtttgccagtattttattgaggatttttgcatcgatgttcatcagggatattggtctaaaattgtctttttttgttgtgcttctgtcaggctttggtatcaggatgatgccggcctcataaaatgagttagggaggattccctctttttctattgatgggaatagtttcagaaggaatggtaccagcaactccttgtacctcaggtagaattcagctgtgaatccatctagtcctggactttttttggttggtaagctattaattattgcctcaatttcagagcctgttattggtctattcagggattcaacttcttcctcgtttagtcttgggagggtgtatgtgtccaggaatttatccatttcttctagattttttagtttatttacatacaggtgtttatagtattctctgatggtagtttgtatttctgtgggatgggtggtgttatcccctttgtcattttttattgtgtctatttgattcttctctcttttcttctttattagtcttgctagggacaacattcttttatgcagtccttttcagttatccccaccttcccagttgccttatgaggttgagacgttttaacaaaattatctgctacactgactattcctgtactgcagcccatctcattgctgctcttctccccaactcaaagcctccttcatgtcttcctcttgtatcacccccaccttaacccacaagtgtgggacacctctactccctctctggcaacaaatcacacacccattactatcccattaaaacctaatcacacttaccccactcaatgccagtatcccatcccacaacagactttgaagggactaaagcctgtccagaatcttcaccttatcaacaaaattgtctttcctatccacctggtggtgccaaacccatatactctcctatcctcaatacctccctccacaacccattattctgttctggatctcaaagatgctttctttattactcctttacacccttcatcccagcctcttttcactttcacttggactggccctgacacccatcggtctcagcaacttacctgggctgtaccgctgcaaggcttcaggcacagcccccattacttcagtcaagcctttcttcatgatttactttctttccatccatctgcttctcaccttattcaatattttgatgaccttctactttatagcccctcctgcgaatggtctcaacaagacaccctcctgctccttcaacatttattctccaagggatattgggtattcccctccaaagctcaaatttcttctccatctgttacctacctcagcataattcttcatgagaacacgtgtgctctccctgccaattgtgtccagctgatctctcaaaccccagccccttctacaaagcaacaactcctttccttcctgggcatagttgtatactttcacctttggatacctggttttgccatcctaacaaagctgttgtacctgagcgagttagagaaaatgtcacactttgagatgaattaagagtccatttatttagccagcggccaacagatggctaatgctcaaaattctctcagccctgaagaaggggctagattttcttttatactttggtttagaaaggggagggggctctagttaaaacaattttacagaaataaagtaggcaaaaagttaaaaggataaatggttacaggaaagtaagcagttccaggtgcaggggctttaagactattacaaggtgatagacccagggctttgggcgttatcaatgggacgaattcctgggaattgtggatatagcttgccacagtatcttatcagttaattgcattcttggatgtgctgggagtcagcttgcacaagttaagtccttgaggaagggggtgccagtgaaagagccaagatggagtatgtctggctctcttagcaaagggagagtcaattcaggtggaaaaaggctaggtgattaaaggaaaagggagagtctaaaaacagtgttagtaaaaacaaggttgggcattacattcctcacttgtgtttttggggaatcaaatcgttgattcctcagttatagcaagggggttatactgagtcttaagatacataagtttgacagaagctatgcattgttttacaaaatgaagaaactaatttaatatgcaaggcccaaaaattagacttaataataggatggggaggggtccggctaacttagtgattagagtagttatccctgggttctagttgaacatgctttgatactaggggatgttattttctcatttttgttggtgcctatctagattttctcacaccttttggagtgtatcttttatgactaagaatggtggaggaacagttaaatcaactttgtcagggtgtttctggaacataaggttacttagatcagttaaaggcctaattgacttaggtgggctctatgagactaaaattttcttttggatggtgaacatagttctaacatcgaatcctgggatataaagtcttaatctttatgacatgccataatactattgaactgaattagggtcatgaactgttatagtaagaggattacaatttttttagtacatgatttaggacaagaagctttagttatggaatgaagatctggttgatcctctagagtaggtggctaaagttacacatgtctaatcagggcagaaaaactgataagtatattgacagctagcgtcagggtgatttctaggacagaggtaaaagtcaacattttggagtctttttttctgcacttttggagcttctacatctagtttggctcttggagcgcttaaatcttgctgcaaggtcaacacttcctgctcctgggactggcagattgtgttgctcttcatgggtaccggctggctctgggaagagtacacataaatcaactgcaaaggagacttctttggaggtaccagccttctaagtggtgtttgcaaatacacgtcctgttgtgaaagaggtgaggagaaaggagtaggaagatacagaggatttaaagggcaaaaacaaacaagtgaggtagataaaaagaattaacctaatggcttcacttgacttaggcacagttttaaggggcctgacctaggcctggagacctatgtttctagttgggctgtgttggtctttttgatgcaggagtgatgaatctaagcaggagtaccatccaccttcagagccattggcatcgtgaggatagtggtgtgaggtcttttctaagcaggagtgagtccttctttttggaactttttaacaaacactaggtctcctggctggaacaaatggcaggaacctgtctggtcaggaattggattgggatgggctcctcgaacaagtggcaggatgatatcttgtacttgttggagagactgtaggtactgtaataaattagcttgtgatatttctgccaattgggcatctcttagcttaggcaacatagtcagtgccttcctatacatgacttcaaaaagtgagaacctagcctagtaaggggtgcatcttactttaagtagggctaaaagaaggagacttacctaattttcaccggtttttaagattaattttgtaagagtgttttttagggtgtggttcatgcgttctacttacctagagctctggggtcgataggcaccatggagcttccattgaatgttaaacaccttactgaccgactgagctatggacgaggtgaaggccggtccattatcagaccttatggcagcaggcagcctatgtcaagggatgatttcattgagtaaaaactattgcgctggcagtttcgtttttggtagcaaatgcctcagtgcatccggagaaggtgtctgctagtactagaaggtatctgtacttatcctggcgtggttttacttctgtaaagccgatttcatacttttcttctggtgagttttctcagagatggtggcctgggctgggattaggaccttgcttggcatttacctgggcgtaggttgtgcaccggagagctgcttgatctgttaggctttgaagacagggcattcttctttgtttttgatagcctttcctgctgaggtgagtagcctgcactcctggtagatggctccatgaacatgcacagtagcaaaggcgtacctgctgtcagtgtaaacgttaatatccttaccccatcggagaacctgagtgagggcgatcaattcagctttttgcgctgacgtgtttgctggtaaagcctgagcctacgacacatttgtctccgtggtaacagctgcaccggcctttcgtactccctgctcgagaaagctgctaccgtctgtgaacacagtggcgtccgccttctctagggccacatcttgaaggtcaagtcggccagtttcagtagtttctaacagttcctgacagtcatgaatagtagctggatttaaacaccttgtgggagagaaagtcaaacgaggctgatctaacagtaaactctgatactgcaggatgcgagcatttgacatctattcaccagaagcactttaaagtaaagtctctacagcatgaggagccgtaagagttaaattttggcctagaatcaacttatcagccgcttggactaggcttgctgtagccgctacagctcgcagatgacttggctatccggaggccacaggatccagtctcttagataaataggccactgggcatctccagagtcttaaagtctgtagtcttaagcttttttagcaacttcctggctttcatggacaaacaggtgaaacggctttgagatattagggagggctaaagcaggggcttcagttaatgtctttttcaggttttgaaaagtctgttcttttgtgtctgtccaaattaatgggccatttcatcctgtacttcttggatagccactattaagatttttgtttgtcttttgaatgctttatcagtggccttttcagctgcctgtgttgcttatttctgtttttcaaactctcgattgtcaaaaaccttttgggctatttctaaaagctgactgatattcattccagcaaatccttccagtttttggagttttctttttaatatctggggctgcctgagccacaaatgctaaattaggaggacggctattttcgggggccgttgggtcaaaagctgtgtaaatccgataagcctcctggaggcgctctaaaaacgctcctggtgactcatcgggcctctggacgacttcagtcaccttagataagtttatgggtttctgagcagctcctttaatacccgctaggggataccagtggaaattgtctaaagctttccctccacttgaggaatttgggtcttaattaggccgggtagaggggaaaccctcctccaggaggtctctagcttcctcctctggctattggctgatgtgaggttgacaatcatcctaggtgggccgatgtgtctggagtatggactccatcagtgaggtcaaagcctggggcttttcagagaagggaggattatgggttttctaattatacaagtcagaattagaaagaagggacataaactaagaagggggctgagcgcttgtcacctggagggacttgtgcctctcttagtggtagtagaggggctacttcctcctgctgtggcttcagttgaggggcaatgggtggtgagcctacaggaggtgtcgtcgagaagacatgggatgaccttaagggagcaggctggttgtaaggcggtgcgacttggtgagggagactctcctcttcttcagagggaggcagtacagggggagccaaccagccgagggtcgaggcaaaaacgtggtctggctcaggaggactttggaggtagaattattaatggcgcatgaatggagccatggaagagggctcctgaccaaactcagccattgatcaatgtgatcagggtggctgggagtttcggtaacaacctgccacacagcttgaacaattgtaggattcagtgacctttcagggggccacctaactctaaactttggctattctatcttgcagagtgtccagagcttgccttttttaaggcagactgcataatctttggaaaaactgagaaaaattctgtagcatacattggagagggctctaacttttacaaggccgggaggaagtgtttcttttttttcttttcttttttttttttttttaaaaaggcaatttaacagaatttgagcagagatatcagatctaacatggacagagacactcactccctggggggctggagtatcggaaaaacagaattaacataactagaaagaacagaaaaactacaacagctaatactacttgtcacattgctgtagctttaagattgagggaaggggactagaggctagtctgaggtctcctgggttggttggatctaggcgttctcctcctttttcttctagacctgtaccttaaatacctttgatgtctccacaactcaaaggcaaatagctcaaattcagctctttcttttaagggttcaaggagtgagagcagagccaagtcctggaaatgctgaacttgttgtcacaccagaaaatgagatgtgcagcatagggggcagggatgaggaggaaaaggaccactcagatcatccttaagatgagagagtagccacagaggaacagagtaggaatctaaacgaagtaaagcagtacgggcataggtttccttagacagtgttctatttaagagcacaggaaaagttacagaatgacaaaagaggttagcaaggaaatctgcagggtggctattttgaacctactacaaatttaatctagaggaggtctaatcacttggatgtggggtatgacaatctaaatgcctacaacctccatggtgccagaaatcttaatctgatgaatgttcttcacacttgttcctgtaacaacacttgacttgcctctggcagaaaagacaggactgtggtggccagcctaaatgattgatgagaaacttaacctcttgtgacaaaaaatcagcactaaggaccttgaagaagtttttacctagacgtcttgggcaatacttacatcttgacatgcaaaaccttgacgactactaaacaagacaatagacactgaacaaaacaataaacataaaacaaacaattgactttagggcatgtaaacagttataacagttttcctatttattttttattagacagacaaggggagggggtcctgtgatgggatcattcagatgtctgcctggcctctcttgctgaggggacttgggctcctgttataattggcaggccggtgtaaacctctggctcggatcgagctatgcctgatgctgccttaagccttatgaggtcaccacggaactgcaggtgaggacccactcaaactccatagcttttgctgtggagctacaaactggaagacaaacgcaagcccttgtcttccccactcactcaccattcacacagagtttataacaatttttttctcttttctttttttccttcttggagattctccaagaaacttgaacaagagaaagacgagagatgaaaaaagagagagagagactggtctgccagaaactaaggttcagttccccagcatcctgggacgtgaactcagtcaagggagggcccccatcaggaccacttcctacctaaaccaagacacaaaggcacctacgagaaaaccaaggctcaaccttttagcatcctggagtaacgggctgagtcaaaagagggacgcctttgtcagggctgcttccttcttaccagaatcgaagtcaaatctgacctacctgaacctggggtcagaagctgaggactcagatgttgaattttagggcacccacacggtagttgatccgctctcctccggaagacagtcacccttcagggacctgaaaaaaatttttcaggtggcacctccccctataagccagccatctgtcctggggagcccagagcgagaaaggctctcgcccagtggcgttaatatctcactggggcctccaaatcttgtacctgagtaagttagagaaaacaccacactttgagaagaattaagagtccgtttatttagccagcggccaagagacagctaacgctcaaaattctcttggccctgaagaaggggctagattttcttttatactttggtttagaaaggggagggggttctagttaaaacaattttacagaaataaagtaggcaaaaagttaaaaggataaatggttacaggaaagtaagcagttccaggtgcaggggctttaagactattacaaagtgatagactcggggctttgggcgttatcaatcagatgaattcctgggaattgcggacatagcttgccacagtatcttatcagttaattgcattattggatgtgctgggagtcagcctgcacaagttaagtccttgaggaaggggctgccagtgaaagagccaagatggagtctgtctggctctcttagctaaagtagagtcaattcaggtataaacaaggctaagtgattaaaggaaaaaggagaatctaaaaacaaggttagtaaaaacaaagttaggcattacaaaaccattatataaactcacaaatggaaacctagctgacctcaaagatcccaaatcctttccccactcctctttccgttccttgaaaacagctctagagattgctcccacactagctctccctgactcatcccaacattttttattacacacagccaaagtgcagagctgtgcagtcagaattcttacacaaggaccaggactgcatcctgtaggctttttgtcgaaacaacttgaccttactgttttaggctgtctttcatgtctgcatgcagtggctgttgccactctaatacttttagaggccctcaaaatcacaaactatgctcaactcactctctacagttctcataacttccaaaatctattttcttacacttattgcatatactttctgccccccccccaccccctaccccagctccttcagctgtactcactctttgttgagtcctacaattaccattgttcctggcccagacttcaatccggcctcccacattattcctgataccacacctgacccccatgactgtctctctctgatccacctggcattaactccatttccccatatttccttctttcctgttcctcaccctgatcacattttgtttattaatggcagttccaccaggcctaatcaccactcaccagcaaaagcaggctatgctatagtatcttccacatttatcattgaagctactgctctgccccacctccactacctctcagcaagccaaactcattaccttaattcaagccctcactcttgcaaaaggactgcatgtgaatatttatattgattctaaatatgcctttcatatcctgcaccaccatgctgttatatgggttggaagaggtttcctcactatgcgaaggtcctacatcattaatgcatctttcataataacacttccaaaggaagatggagtccttcactgcaaaggccatcaaagggcctcagaccccattgctcaaggcaacaattatgctgataagacagctaaggaagcagccagtattcctacttctgtccctcatggccagtttttctccttctcatctgtcattcctacttactctcccactgaagtttccacctatcaatccctccccactcaaggcaaatggttcttggaccaaggaaaatatctccttccagcatcacaggcccattctattctgtctgtcatcatttctttctttttttttttttttttttttttgagatggagtctcgctctgtcacctaggctggagttcagtggcacgatctcagctcattgcaagctccacctccggggttcatgccattctcctgcctcagcctcccaagtagctgggactacaggtgcctgccaccatgcctggctaagtgattctcctgcctgagcctctcaagtagctgggattacaggcatgcaccacaggttgtagagtttgaggggtcagattcttaacaagaactgattgttcagctatggtgtcttcatatggctgggaatctgaagtaggcaagagaagattagcagcctggcaaatttcctgtctagcttgctagaggattggaacatagacgcctagagggctggtgtctgggatgaggtcggggccaagcaagaaagtgcatccatataaaagttcaaatggactgtaccctttagcatctcaaggacaggctctaattctgagaagggcaagaggtaaaagtactgtccattctgttttaagttggtggctgagcttggtgaggtgtgtctttaaaagaccattagtccgttctacctttccagaggattgaggacggtaagaggtatgaaggttccactgaatatcaagagcctgagaaactactggggtgatttgactaataaaggcctgtcccttttcagactgtatagaggtgggaaggccaaaccaaggaactatgtctgacagaagggaagaaatgacggcagtggccttctcagaccctgtgggaaaggcctctacccatccagtgaaagtgtctacccagaccataaggtattttagtttcctgactcagggcatgtgagtaaagtcaatttgccagtcctgggcaggggcaaatcccaagcttgatgtgtagggaagggagagggcctgaacaatccctgagagtagtagaatagcagatggaacactgagaagtgatttccttgaggatagcaatttcaattgctcttttttattcgtggccaggcatggtggctcatgcctgtaatcccagcactttgggaggctaaggcgggcagatcatgagatcaggagatcgagaccatcctgactaacatggtgaaaccccatctctactaaaaatgcaaaaaaaatggcgtgaacctgggaggcggagcttgcagtgagccgagatcatgccactgcactccagcctaggcgacagagagagactccatctaaaaaaatattaaaaaaaaaagacattgtagccaacaaatacatgcaatgattatattttgattaaaaacataatcttttaaaaggagcaattattttttattcaatgaatctttgatacagtcactttaaattcttaggtgttaagcctataaatgttcaatggcttaggtaatgtcttatactgcatatcctacatgctaatcactgtgactatcagattctcttttgttcatagcattttttaaatataatattttgtttttcttattaaaatttatttttctgtcatgcctaaatcttgataaaaataaagaggatgggtttgcctgatttattccaaagtcaaatagcagttttgcttttttctttttagtcagtaactcatttgtttcacacaataaacatgagaattaaataattcaattatagttatatcctcatgctaacaatggagaaatatttgagttattttttgatagggctaaaatcttattttatatttttattacagattatttcatgtcaagtgactagaatatgaattttaataatatactatgaaattagaaaatgtgatagtcacagattatggaagtacagtgaagaaatagattatattaagaggtgatttattatatctataataaaatggagtatataaatagccatataacaagtaaagtaaaaaggttacttaaaatgtttttacataaaaagctcagtgtcaagttgcttaaattttaaattttaccaacacttaatgaaaagttgataccaatttcccacaaaaactgtgagcaatagaagaggtaacatttcccaattcatctattagccaggattaccatgaccccgaaaccagacaaaagaatcagaaataatgaagactatggaacaacgtcccatataaatatagatgcagaaattttcagaaacactagcaaattaaatccagcaacatatgaaaatgagttcataccatgaacaggtaatattttttcacaaatttagtgttgacttaatatttaaaaaatcaactaacatattacaaaatagtaattactcacaggttttgtcctggtcgcttcacctgtgcaggacccaagaatctgctctgctcttgttgctctaagaagccaggtgcttaaccatgagaaccaggagaaagaaagctgagggagccagaagaggaagcgagctacagaaagaggggtgacaggacctccaggcgcagggtgcttcgggcagggaggcgggcagggctggcggctgcctgggtcaggtagcatgaggtggatctgagggtactcacggacaggatgttccagcaacgaaaagagcagaagctccagcttttagttgcatggccattaccacgaccaaacaatgggaaaaggactgactctccaacaaatggcaccagagaacttcatgtttaaattaaaaaaaaaaaaaacaaaacttgggtctgggcgcggtggctcacgcctgtgatcctagcactttgggaggccgaggcgggcggaacactggagatcaggagttcgagaccaacctgaccaacatgacgaaaaccctgtctctactaaaaatacaacattagctgggcgtggtggcaagtacctgtaatcccagctactcgggaggctgagtcaggcgaatcgcttgaacccaggaggcagaagttgcagtgagccgagatcgtgccactgcactgcagcctgggtaacagagcaagactctgtctcaaaacaaaaaaacaaaaaccttggacccttttttttttgcatattatacaaaaaatgtctatgtatgcaaagcagaaactggaagtaacatttgcatactcatgttgataatcatattattcacaaaaccaaaacttggaagcttcttaaatgatttttgatgtataattttttttttttaaattgaaacagggtctcactctgtcgtccaagttgaagtgcagcggcgccatctcggctcactgcaacctccgcctccggggttcaagtgattctcctgcctcagcctctggagtagctgggattacaggcgtgtgccgccacacccggataatttttgtaattttagtagagacggggtttcaccatgttggccaggctggtctggaactcccgacctcaggtgatctgcccacctctgccttccaaagtgctggggattacaggcttgagctctcacaccgagccgtataaatggatttttaaaatggcatatacatgcgatggaatataattataccttataaaaggaaattacgtcacatgctacaatgaagataaacctttagggccagtgtggtggctcactcgtgtaattcagtttgagagggtgaggcaaaaaaatgttttgagcacaggagtttatgactagccgggcaacacacacacacgcacgcacacacacacacacacacacacacacacacaaaggataaacctttaggacattatgttaagtgaattatgccaggaacaaaataacaaagagcatataatttgatttacatgagatatcttcagtagtcaaattaataaaaattgaaagtagaatggtgcttgtcaacaactggggtagggggtaaaaggggaagttcttgcttaatgggtttgaattttgagttttacttttgcaaaatgtaaaagttctaaaggtcttttgcataacttttttttttttttgatactgagtcttgctatgtcgcccaggctggagtgcagtagcatgatatcggctcactgcaacctccacctcccgggttcaagcaattctcctgcctcagcctcctgagtagcggaaattacaggcacctgccaccatgcctggctaatttttttattgcataacaattttaatacacttaatactactaaactataaacttcatggtcaaatatatgtaataacattttaaaaagcataattattaaaagtatacaatttttaattaaataggattgactttgcatcttctttgctttatgattatgtaaaagttttacttccattatcatgccaattttctaccttctctttctttttttttttttgtttttttgagatggagtctcactctgtcccccaggctgaagtgcagaggcatgatctcagctcactggaaactttgcctcccgggttcaagcaattctcctgcctcagcctccaagtagttgggactacaggcacgtgccaccatgcccggctaatttttgtatttttagtaaagacggggtttcaccatattggccaggctggtctcgagctcctgaccttgtgatccatcctcctaggcctcccaaagtgccaccaatcccggccattctaccttctctttctaatcctactgagattttcttaactcttttctattcttgcataattaataaattcaatgcatttctctgagatttattgtaacaatgaaatttttacttttactttttttttttcttgagacggagtctcgctctgtcgcccaggctggagtgcagtggtgcaatctcggctcactgcaagctccgcctcccgggttcacgccattctcctgcctcagcctcccgagtagctgggaccacaggtgcccgccaccacgcccggctaattttttgtatttttagtagagatggggtttccatgttagccaggatggtctcgatctcctgacctcgtgatccacccgccttggcctcccaaagtgctgggattacaggtgtgagccacggcgcccagctaagatttgtttcttgttcatagaattgttacacagattaactgcatttttactagtttttgtctttattccaaaatccaggctggtgaagcggcttctctctacattttactgattttcatggcttagagaaaagaagcagttggccgggcgcagacgctcacgcctgcaatcccagcattttgggaggctgaggagggcagatcccgaggtcaggagttcaagaccagcctggccaacatggtgaaacaccatctctagtaaagatacaaaaaattagccgagcatggtggcgtgtgcctgtagtcccagctacttggaaggctgaggcatgagaattgcttgaacctgggaggtggaggttgcagtgaggtgagatggcaccactgcactccagcctgggtgacagggtgagactccatctcaaaaaaataaataaataaataaaaagaagcggtcaaccacacattgactcttaaaatttatgctcagaagggacacaccttactttagtctattttcactggccaaataaagttaaatagccaagtctgatgtctatggggtaagaaaatataattctcttgggagggtcatcaaatatcaggaaacaataatacaacttaccacaaaaccttcctactcagctgaatattaaattataatatagtcattcataaacaaaggaactttgcatttaatactatttattagtaataatatttaatatctattgtttgcttattttctgctagaatcaatgatatgcattttatttttttaatttttttagatagggtctcactcttttatccaggctggagggcagtggtgtaatcacagctcatggcagtctcaatctcttgctgaaatgatcctcccacctcagcttcctaggtagctgagattacaggcatgcaccactgcacctggctaatttgtttcattttttttttttggacagatggggtgtagctatgttgcccaggatgctatccaactcctttgctccagcagtctacctgtcttggcctatcagtgctggcataggctgctgtgcccagccaatgataagtgggtttttttttgtttgtttttgttttgttttgtgttgttttgagacggagtctcgctctgtggcccaggctggagtgcagtggcatgatcttggctcactgcaacctctgcctcccgggttcaagtgattcttctgcctcagactcccgagtagctgggactacaggtgcccgtcaccacacctggctaatttttgtatttttagtagagaccaggtttcaccatattggccaggctggtctcgaactcctgacctccagtgatctgcctgcctcggcctcccaaagtgctgggattacaggcatgagccactacacctggcccatcataagtattttatatgtgctatttcatttaaatgtaagaggctggtatataattatccctattttaaagatgaagctagtaaaatgtagtgaagttttgagttgcataaataatgaagtagagctgcctctaatccttagtaaattgccatacgcacactaatagtaacaatgtgtcagtttataaatgcgcatgaagttgtacccaaagctactgatatttttctttactaatttggattatccttggagctgccatgaataaaatatccatctagagcccacaagagagcagcacatctgagaacaaacatgaaaacaatgaagcagccacttttagtgagctcagcagaaccatgggttcaaactctactgaccatacttataaaccatccagggctccaggacaactaaaactgtggcttctaataatggagaaccacctatgacatttaaggtgtgactttttaaaactgaaaagaacaaatatgattactgctaacgtttttattctgtttatttgactttgaggatgaatgagtagatgtaagagagggcaatgatatgtcttaatagtcttctgaagtaataaataatttgatttggtctgtcagaagtctattggctactaccaaacaaaccacagttatcccgcgttcaagcgattctcctgcctcagcctcctaagtagctgggactacaggcgcctggctaattttttgtatttttagtggagacggggtttcaccatgttgtccaggattgtcttgatcacctgacctcatgatccgcctgcctcggctggcgtgagccaccgcgcctggttggctggagtgcagtggcgcgatctcagctcactgcaacctgcgcctcctgcgttcaagcgattctcctgcctcagcctcccgagtagttgggattacaggtgcgcaacgccacgcacagatactttttttttgtatttttagtagagacggggtttcaccatgatggccgggatggtctcgatcacttgacctcgtgatccgcctgcctcggcctcccaaagtgctgggatcacatgtgagccaccgtgcctagcccaacagcatcatttttatctaaagctgtagttcagcaaatgctataaggtgaataattaaatattatttactacagacccaagcagtctactatgattttattaccctttaatacaaatttatttcttgaattaaataattatttctctattttagttgtattttctttgtgtctgttgctaagttttgctgaaatactaccattttacttaaacttgccccacagttttttatttgtttaaaaaacttcaaaaaaaatattgtaaacatgacagcttgcattggtagtcccagctactcaggaggctgaggaaggataatttcttgaacccgggcagtggaggtttcagtgagctgagatgtcgccattgcactccagcctgggcagcaagagtgaaactccatctcaaactaaaaaaaaaaaaaaaaaaaaagaaaaagaaaaatgtagaattcaatatgctaaaacaacttttttatatcaaatatatacatcatattgatggttgtctgatacgaatattaagtgttctgtattagattttgcaaaatatataatttttttgcacgagtcatgagcaaaagcccaactattcaaatggccataaaaaatgatttttttgaaaaataatatatgattttaaaaagtttgggccgggcgtggtacctcgcacctgtaatctcagcacttttagaggccgagatgagccgatcacctgaggtcaggagttcaagaccggcctggccaacatggtgaagccctgtctctactaaaaatagaaaaattagccaggcgctgtagcatgtgcctgtaattgcaactactcgggaggctgaggcagcagagttgcttgaacccaggaggtggaggttgcagtgatccaaggtcgtaccactgcactccagcctgggcaacagagagagactccatctcaaaaaataaataaataaataaataaataaataaataaataataaagagcaaaacaccatctcaaaaaaagaaaattaccattctctgctctttttttttggttcgttttttgggtttgtttgtttgttttgagacagaatctctctctgttactcaggctggagtgcagtggcacaatctcagctcactgcaacctccacctcccgggttcaagcaattctcctgcctcggcctcccgagtagctgggattacagccatgtgccacgacacctggctaatttttgtatttttagtagagacagggtttcaccatgttggccaggctggcctcgaacttctgaccttgtgatccacccacctcggcctcccaaagtgctgggattacaggcgtgagccaccacgcctggccaacggttttcttttttacagatgagggtttgctacattgcctaggctgttctcaaagtcattggctcaagcaatgaggctcctgcctcagcctcccaaaatgctcgctgtaatatttaataatacttatatgagtcaagtgtgctggctcatgcctgtaatctcaacactttggaggctgaggggaaaaaatagtttgagttcaggagattaagacgagtcttggcaacatcgtgaaacctcatctcgactacaaataaaaaaatagtaagtggacatggtgatacatactacagtactagctacttgagaggcttatgtggaaagaccccttgagccctggagatcgaggttgcagtgagctataatcacaccactgcactccagcctgggcaacagagtgagactctatctcaaaaatacttatagacagaatgcatttatataattttgttattcactgtattggattaacttataaacaaaaaatataatacagtcaaaggcggaatcatccctttctagtctttcttttgcctttcatgttagctcctcactcccaaagcaacccagcctgtagggctagatgttgccatgctgccaactgtttacattcttactctgataccacattagcttttctgagcatatctctcagagaagaattttgctttatatttgtgtatgtaagagactataaggttggctttcttactacttctttttcaatgattaaaaacaaatcctggggccgggcgcggtggctcacgcttgtaatcccagcactttgggaggccgaggcaggcggatcacgaggtcaggagatcgagaccacggtgaaaccccgtctctactaaaaatacaaaaaattagccgggcgtggtggcgggcgcctgtagtcccagctactcgggaggctgaggcaggagaatggcgtgaacccgggaggcggagcttgcagtgagccaagatcacgccactgcactccagcctgggtgacagaacgagactccgtctcaaaaaaaataaaaataaaataaaataaaaaaacaaaaaaaaaaacaaatcctgggccagacgcagtggctcacggctgtaatcccggtactttgggaggccgaggtgagtggatcacccgagatcaggaggtcaagaccagccttgccaacatggtaaaaccccgtctctactaaaaatacaaaaattagccaggcgtggttggtggccggcacctgtaatcccagctacttggcaggagaattggttgaacccgggaggaggaggttgcagtgagcccagatcgcaccattgtgctccagactaggtgacaagagtgagactctgtttcacaaacaaacacacaaacaaacaaacacacaaaatcttggctgctggcaaccaggcacagccaagtaaggtgagggcagaaagcagatacttgcaatccatggtgcatcagcttttttaacatattttttctccccaactacatagaaaatatcctaagtgatctcatgcatctttgaatccaaacatctcattttttgccttatccatattacaaacgtattcacaatttataatgcataatcaatctattggaaaatattcaaaacaaatgcattctcttcatggaaccaagtagtacacctgaattaaaatttgtattgagaattattagtataataattttttaaaaaattattaagtacttttagatgtttagcacttggaaaatattataaaaaccctctcaaaattaacctgggactccaaaagacatgtatggtccaaacagttcttttcttcacaacaccgaggaatggcatacaaggctgtctccaagaggtcacatctcttccagaccttaacgaaccttaaaaataatttttcatgtgcagtgactagcaagaaatcaaagatgacaaagctcacaataaataagacagtgtgaaatacaccagaaaaaaaataactgaagcaaatttgcaaagacatctaatattagaattatcagatacgaaaatattaaaaacaactacgcctaccatattacaagaagataaagtattggcaggaaaaaaaatattaaaagttttaaaaataactaagttgtggctgggcgcggtggctcacatctgtaattccagcacttcggtaggctgaggtggatcacctgagatcaggggttcaaaaccagcctggccaacatgataaaacctcatctcaggccgggcatggtggctcacgcctgtaatcccagcactttgggaggccaaggcaggcggatcacgaggtcaggagatcgagaccatcctagctaacacggtgaaaccccgtctctactaaaaatacaaaaaaaaattagccgggcgtggtggcgggtgcctgtagtcccagctatttgggaaactgaagcaggagaattgcttgaacctgggaggcagaggttgcagtgagccaagattgcgccactgcactccagcctggggaacaagtgtgaaactccatctcaaataaaataaaatgaccaagttgtagaatgaataatacaataactaaaatgaaaaactcgctagtcacatttgaacttatgtgcacaagacagaaccagtaaactagatgctagatcagaagaaattaacacataggcaacaaatgtcagtctcagaaaacttttctggtaagttttccagacattcaaaatttaaaactgaaaagcataatgttgatattatttagcctcttccaaaaaatagagtaagtaaaaaaccctgcataacttaattcctgagttaataccaaagcttgacagaaacaaaatgagagcaactatagacaatctcattaagacaaatagaaaaaaatgttaaagcaattgctaacaaactaaattttgctctgtaaaaaataaataaaaccataagtaagtttggtacagtataagttgaaattgtaaaatctacatgtctatatataataggcacagaaaaagagtttggtaaaaactttttagcaaactagaaataaaagaaaatttcattttattttctaaatatacaaggtatctaaaataaactacagcaaatgtaaatgtacaactattgaaagcttgtcttttgatgtcataaacatgataatgatgctgctgtcgacgtttttattaaacattgcatgtatggctccagccaacaaaataaaatgagaaattagtattacaattatattggcaaagcagaactagtcaataaactagtacctaaacaactgttctacctaggtagattgcatctctgcaaagcaactcacacaaaaattgttcacatagatcgaggatttaaaacttttgggagaaaatagaggataacattgtttttattaaaggaggagaccacccctcatattgtcttatgcccaatttctgcctccaaagaaagaagaagtaaaaactaaaaggcagaaatgaaatccacaggcagacagcccggcgccatgccctgggcctggttaaagattgacccctgacctaaccggttatgttatctatagattccagacattgtatggaaaagcattgtgaaaatccctgtcctgttctgttccgttctgattaccggtgcatgcagcccccagtcatgtaccccctgcttgctcaatcgatcaggaccccctcacgtggacccccttagagttgtaagcccttaaaagcgacaggaattgctcactcagggagctcggtttttggagacgtgagtcttgctgaagctcctggccaaataaagcccttccttctttaactcggtgtctgaggggttttgtctgcggcttgtcctgctacattataactgtggggtaaaaagacttattaaacatatagaaatagtgcataggctgggcacagttgctgatgcctgtaatatcagcactttgtgagctccaggtgggtggattacttctggtcagaagttcaagaccagccaggccaaaatggtgaaaccccatctctactaaaaacacaaaaattagcgaagtgtggtggcacatgtctgtagtctcagttactactcagaaggctgaggcatgagcatcacttgaagcaggaaagcagaggttgcagtgagctgagattgtgccattgcactccaccctgagcgacagagtgagacttcgtctcaaaaaaaaaaaaagcatgaaaatatgtataaattagactatatcaattttaagaatgtttaattatcaaaatcttataaaaacatgttttagtaaaaatagtggaaaaagcacatagtggaaaatgttttaaaaacacctattacaggctgggcccagtggctcacacctgtaatcccagcactttgggaggccgaggcgggtggatcacctgaggtcaggagttcaagaccagcctggccaatatagtgaaaccccatctctactaaaaatacaaaaacttagcaggcgtggtagtgggagtctgtagtcccagctactcgggaggttgaggcaggagaatcgcttgaacccaggaagcggaggttgcagtgagccaagatcgtgccactgcactccagcctgagcgacagagcgagcctccatctaaaaaaaaaacaaaacaaacatgttaaaaatatcagcatttagaaaatatatattacagaatatgtgtgcataaacaaggaaatgacaaacatttaaaataggacagatggcaaatcttaaaacaagaacttataaaaattgctaactctattagtaagcatggaaatgctaattgaaactacaaatgatacactttctttttttttttttttttttgagacggagtcttgttctgtctcccaggctggagtgcagtggcgtgatctcggctcactacaacctctgcctcctgggttcatgcctttctcctgcctcagcctcccgagtagctggactacaggcgccggccaccatgtctggctaattttttttttttttttttttttttttttttgagacggagtctcgctctgtcacccaggctggagtgcaatggcgcaatctcggctcactgcaagctccgcctcccgggttcacgccattctcctgcctcagcctcccgagtagctgggactacaggcgcccgccaccacgcccggctaattttttgtatttttagtagagatggggtttcaccgtgttagctaggatggtctcgatttcctgacctcgtgatctgcccccctcggcctcccaaagtactgggattacaggcgtgagccactgcgcccggccaaattttttatatttttagtagagacgggggtttcaccatgttagccaggatggtctcgatctcctgacctcgtgatccgcccacctcggcctcccaaagtgctgagattacaggcttgagccaccgcgcccggcagatacacctttctaatttaccattttgtcaaataattatgtctagtagttttaagagttgataaaaatgtgaagtaattcaaatatccactggcaatagacgtggtttataaattgatgtatgtttgcattatgcaacagtaaaaatacagaactaaaggccgggcacggtggctcactcctgtaatcccagcactttgggagaccaaggcaggcagatcacgaggtcaagagatcgagaccatcctggccaacatggtgaaaccccgtctctactaaaaatacaaaacttagctgggcgtggtggcacgcacctgtaatcccagctactcgggaggctgaggtaggagaatcgcttaaacccgggaagcgaaggttgcagggagcggagattgccactgcactccagtctgggcaacagagccagactctgtctcaaaaaaaaaaaaaaaaaaaaaagagacctatagctatgcaaagcaacatgaaaaaatagaaaaacaacataaataagcaagtcacagatgaaaagttatgctagaatatacatacaggcaaaaaataggcaacactgaaatgtatattgtttatacttaaaattgcataaagtaaatggtaacagaggccgggcgcggtggctcatgcctgtaatcccagcactatgggaggccgaggcaggcggatcaccaggtcaggagatcagtaccatcctggctaatatgatgaaaccccatctctactaaaaatacaaaaaacattagccgggcgtggtggcacgcgcctgtaatcccagctactccggaggctgaggcaggagaattgcttgaacccgggaggcggaggttgcagtgagccgagatcccgccactgcactcccgcctgggcgatttcaaagcgagactctgtctcaaaaaaaaaaaaaaaaaaaaaaaaagggaaataacacaaaattcaggtagtggtcactttggggtaggaggttaatagaagactatagaggtattgactttacaggagtgtgtgacgattttatgcagcaagactgaaagttttaaaagagtaaagaccaatacttttatttttttcattttatttcctaaggctagcaaaaagtatggcacaaagtgtgtgctccacacacatttctaggttaaatgaatgaatacatcccctttgtaagctgtcaagctatgcaaaccaagactttattattattagttactatagattagtttatagaatcaaatgaaaggtaatgaactgtgggattcagaaagcactattgaaagttcaatgttaccccagcattcttaggtaaaataaattaaaatttttagtttctaaatttgcgaccattataattacatttaatttgccacgtgtagatggaacatgaaatcttacttcaggcgagcataatttgagatgaaaaggcaaaaaggaaaaaaatttaaaaagaataaaaacttgattgagtcaaatctgcaagttctactttatacttaaaaaaaaaattgtttccttctctcctgacccagagtgaggctggctggggagcctgggtccctctgtccttcccgcggtggcagtggctgatctctgctccggcgtgagaggcgccgccctgcgctaggccggagtctgcccggcccagcccctcctcactcccttggactcttcacggtgtctccgggcccctgcacaatcctgagcgtccctcacatggaagccgaggtggtagcaggaagctggtggaaggaactggctccgcaggcagggaggtctcgcccaggaaatgctctgttggcctcggcttcctgcgcacgcagctgggcccggacccagggttggagtcgagacgtacccgggctggacgaccccgggcgttggcgcgcccgctgctgcggttcgtgctgtgctcggctcggctgtggaggaaggttggatcgaggctggaggccagaagtgcaggagccgcctcgcaggcgggaggagtcggtagccatggtctctgaaaactgggccctgtaaacaattttcaggcgccaggaacagaagaaccggcagaaacagccctagagcttgagccaaatggacggactgttggcgctgctgagggcgaaggtgcccaaactcctcaaagtggagcagcaaagcaaccaccagagatggacaagaaaaatgaaaagtcaaagaaaattagcagaaatcaaaggcagttgctaaagcagtgagaaaccgttcacgccacgatggaaaccgagttgatgaaggagtctgggaaacgaatctttttttttttgagacagagtctcactctgtcacccaggctggagtgcaatggcgtggtctcggctcactgcaacctccgcctccggggttcaagcgattctcccgcctcagcatcccgagtagctgggactacaggcgcgtgccaacacacccggctaatttttgtatttttagtagagacagggtttcactatgttggccaggccaacatacagggcaactcacttctttggttcctccaaactgaggcctcacgaaggctcaaatatggagtgagaaggactcaacaacagagcatgcaaaacaaaaaggatgaggtaggatggtcagctctaaggcttagggagtgcctgggggatgccaacataatgattgcagctataaagcttactgggtagaaataaacataaaaagctgaaaacacaatggcttgaatttggtaaaaaaacagtctctggaattgtagcagttgtgccaaaataattgagcaagaatgacatgcatctaaggattattaaggggaatgtttacaagcacacaaaaatttgttcccaaatcttattacagtggtaatattattttccgtaatgacagtttccccaagctaaagatgccatagagagactaaggcaagtgcctaatatgttgtaggcagttagtttcaaaatttaacaaacttacaatgattttatgaattcaattgaactgtttcatgtataaatttcactaaaaggcactgtctagtagctatttctctcagtttttctggaatttttctgtttcttgattccaaatcaaccttacttgattccaaatcaatcttacttgaatcccagtcatttctaaagcctcagatgtaagaacagaaaaacagcagaaatgaagccaagttaccgcaaacagtccacgtctaatacatttggcttcccacatgaaccaaaaacccccacaagctaaacaacagtgggtttaaaattcaacctaaattcaacaatagcagtcacagccatatgtaaaaattagcaaatcacaatgtagaaaactttagtctgttattgcattgttattcttaaatatctactatatttagacaagactttcaataaaaagtacttatagctaccatgtatgaattaaaacagccctgggggaaatagtattttttattaatgatgaagactgaagctccaaggatgtaaaataatttctactaggcacacagctaatgacccaaatcaagctcatatatgtttgattttaaaatttttaatgctctcactgttgacaatgttggcaaaacttttcaatcatagtttcagtgttggtgcttgggaataaatcacaagtactactgagggaggatgggtagtcaagaaagtgatcatgtccttgggatgcagcaaccacggcgattgcatggtgactgtatattgtcaacacaataagtcccagcatttgcttcgtattccagctcaatcaagcaaagctctctccaataggaaaattttcctgtaaagagcatgcacatttttattttacttgtcctcagactgacctgacctcttactcattattaatagtaaaaaaccatgcccatgggtagagatttagaatgtcatcgagacatgtgacatatgaagaagcatgtacagccactgtgtatgtgctccaagaggaacacccagaacatgcttactagtaacacctctccccttataaataattgtgtaaggctcccgtaagtggagtctccctagttcctttctttcctgtctcattcttacagcctgtcttgaatccctttctttcagggtgtactggctattctgcatctaacttttttttttttttttgaggtggagtcatgctctgtcgcccaggctggagtgcagtggcatgaactcggctcactgcaacctccgcctcccgggttcaagtgattctcctgcctccgcctcctgagtagttgggactacaggcgtgtgccaccacgtcaggctaatttttttttttttttttttttttttttagtagagaaggtatttcaccatgttagccaggctggtcctgaactcctgacctcaagcaatctgcctgcctcgccctcccaaagtgctggggttacaggtgtgagccaccacacctagcctgcacctaacttttaaaagtctttgtttcgcaataaattaccctatgctgcatctcctttgttgtgtgtctcatgtttttttgttttttaacttagaagacaaaaactgaggtctcacaacagccattaacactatcgcactttgttttgtattttttattataaacattttattctctgatatgtcaacattcacatttcaaacagccaacttatattgaagtctactatataacaatgctaaattgaaaatttaaatgatcaggtagggcgcggtggctcaggcctgtaatcccagcactttgggaggccgaggcgggcggatcacgaggtcaggagatcgagaccatcctggctaacatagtgaaaccccgtctctactaaagatagaaaaaattagccgggcgtggtggtgggtgcctatagtcccagctactccggtggctgaggcaggagaatggcgcgaacccgggaggcggagcttgcagtgagtcgagattgcgccactgcactccagcctgggcaacagagcgagactccgtttcaaaaaaaaagaaaagaaaatttaaatgatcacaaaatgatttgtcataaaagcatgtatattttacaagtttcagctttatcacactattcaatttcttaaaacaatttctgacacaaataatcaaatatttaatgatttggattcaattccaaaataatttacattcgtttattgttatatgtacttttgacaaaggtggatttgaaaactaagaaaaaactaaagcatgttcttatttttttttttttttttttttttgagacggagactcactcttgttgcccaggctggagtgcagtggggtaatctctgctcactgcaacctccgcctcccaggttcaagcaattctcctgcctcagcctcctgagtagctggaattacaggcagacgccaccacgcctggctgatttttgtgtttttagtagagacggggtttcaccatgatggccaggctggtctcgaactcctgacctcgtgtttcacccgccttggcctcccaaagtgctgggattacaagtgtgagccaccgcgccctgctaaaccatgtttttaaaggttcaagggacttaagcttagagacacaaatgctctgtagtaaaataaataaagcctcatctttttatcaataatattttaatagttttatgtctgagcacttaagcatcaagaacacgactctggatgatgttgagggaatacttaaatggataaaatagaaagtgatcatcggagtctaataagtgatggatacagcaacataatacttgacaaaaccattcagggtgtgtttgacaaacacggttacataggagctgcactgcatgattaatgtaaagtgttttgtccctaactttagtctttattctcaatcttacaaatatcacatactcacatacacagaataattaacttttttttcctggaaggcagtgtttcatcttttattatgtctgtttcacattgctgtaatgatgctgttgaagtacactctttcaccagaagattacctgtgtgaatttgaatagactgacactggataggaccagctcagcacactcacttgaactgtcttgcttttcaggcagttaaaatgcctttgaagagtgaaaatatactgactgctgattatgcagaaagttttacattaggccgggcgcggtggctcacgcctgtaatcccagcactttgggaggccgaggcgggtggatcatgaggtcaggagatcgagaccatcctggctaacaaggtgaaaccccgtctctactaaaaatacaaaaaattagccgggcgcggtggcgggcgcttgtagtcccagctactcgggaggctgaggcaggagaatggcgtgaacccgggaagcggagcttgcagtgagccgagattgcgccactgcagtccgcagtccggcctgggcgacagagcgagactccgtctcaaaaaaaaaaaaaaaaaaaaaaaaaaaagaaagttttacattaaaaaagcttgtcaattgtttgaaaattacatcgcatggcctacaacttttaaaatgtaaaatgcataaaaatactgcacaacaaaatagaaatgatggagttggccacaaaggacagccaaatctgtatatagcaatatagaaatgtatctactgtcagagtgaggtaacttgaagtatttgagagatgttctctaagaatctaaaattaattttagtttcagtgtccatgttttttaaggatttttaattttcaaaaaatgtttaaatgtgtccattgttttattcctagaaataaaaacggaaggaaaaaagaggtataaaaacaaatgaaatagaaggaagaaagtggattactcacaatagctaaggtatagaatcaacctgtgtccatcaaccagtgaatgaataaagaaattatagtatatttaccgaatggaatgatatccatttctttaaaatagaaagccttgttatttgcaacaacattgataaacctagagaacattatgctaaggaaaataaggcagcacagaataaaagtatatcacatgatctcatttctatgtagagtgtaaaaaagtttaaattcatagaagcagaaagtagaatgataattgcctggggctggaggagatgttgatcaaaaataataggtcttgtctacatctcttaagttaacaaataagttattctcctctcaaattggattaaccagggaattcaatcatacactgaagaatcaatactgaagaaataacacatttgttatagcaatgatggttgtataccgaaatttcagaggcttagcaaaataatatattctctgcttagatcaccatgccctgatggttttctttttctggttaagaggacgtcttcatgatctttcacgaataatattttctttcatcttctatctgcattctcctttcttcagcgaatggatgaaaaaaaaacgatgcagagaagacacatttgcatcttacccacacatcacttttactattaggcaaagtgggtaagcaaaataggcatatacatgaataaagtgcttgtggtaaaataatcattttgttgatttctatggagctcaggttatagatcaaaagctaccaaatataagcagaaaagagtattatttcaaataagaatactgtgaatgacattattctgtcaatagaaaaccataaccttatcctaatagtctcacctatatttgtacatcaaattctttttattaaaaattgtatttcatataaatatgcaagttatatcaccttttttttttaccatttcaatgtcttcttcactctatgttagtggaaaacaggccagctggtcccaggaatgataaagagcacttgtttgggtgatactcctgtgccaaacaccgttatttggcccaaggtactggttttctatttttctctacatttagtaataaaataaaattcttagctaagaagacttgatctcattcaaatatggtttatggaatatggctgacatttaagagtctctgacttatcttgaatattgacttttttatgaattcaaattgagtactataaataatcttttactaaaagcctttgcagagtaagattaataaaatttctttataatataaaaggaatatgttaaccatgcttccagtaatcactctgaccacagcattctcaatttccagtattcaccctgagtcactcaggggaaattggtatttgtaaacaggcagaataaggtgctgttgagtggaggtgaaccacactgcacataatgctttctacatgcacctcttaggctcttaatttaattggactgtcatttatatggctagatacctactcaacctaatcatactattttttagcagctaatgacatgtgttacccattagtcctgtacaactatttgactggctgaaaaatattttgttaatttactttaaattgagagactagatttgcgatcttcaatctttcagtgttaaagcaaatcagagaagcgcaatgcacatagaatgctccttctcttccttttccttttgttgttgttgttgttgttgttgagacggactctcgcgctgtgcaatggcgcgatctcggctcactgcaacctttgcctcccgggttcaagggattctcctgcctcagcctcccgagtagctgggattacaggtgcctgccaccacgcctaattttttaattttttgtagagacagggtttcactatgttggccaggctggtcttggactcctgacctcgtgatctgcccgcctaggcctcccaaagtgctgggattacaggggtgatagaacgcattttcctgcccaacatacttcttctttacatagaatatattccattcaaactatttagccaggattttagatttcaaaaggtcaagaacttaataattgagtgaagccaaaatattgtctttgcttcttgttagcaatctagccatttcaaaaagcacagcaattatgccaagccattgaaagcatgcagttaactttatcccatttcaaaaattgttacttttatgttaatttaagaggaactatctacataactttacatgcattcaaggaatatatatatttgctggatgcagtagctcacacctgtaatcccagcactttgggggccgaggaggtaggatcatgaggtcaggagttcgagaccagcctggctgacatggaaaagctccgtatctactaaaacgacaaaaattatctgggcataatgatgcacctctttaatcccagctactcaggaggctgaggcatgagattctcttgaacctgaggcagaggttgcagtgagccaagattgcaccactgcactctagcctgagcaacagagcaagactctgtctcaaataaattttcatattaaggtatttaatattcaatattgtatgacagtatagtggaatcctcaaaaatgagcataagtttattattaataaatttattaggccaggtgcagtggctcaagtctgtaatcccagcactttgggaggccgaagcgggtggatcacaaggtcaggagttcaagaccagcctggccaacatggcgaaaccctgtctttactaaaaatacaaaaattagctaggtgtggtggcacacctgtaatcccagctactcaggaggctgaagcagaagaatcacttgagcctggtaggtggaggctgcagtaagctgagattgcaccactgcactccagcctgggcaacagagtgaggctctgtctcaaaatacataaaataaatcaatcgataaaattattttttcaaagtttttcaattgttaaagaatcaggtatgcttttcacgataagttcaattttaggagggtacccactggtctccatgttatttctgtaatggatagtataaaactgggtcaccagaattatgcagacatgctcatttaatcagaatgagttcagcctttgtgctgtattggtatctcaggagctgatcattcactacaacttagtaaatattgctccataatcccagcaaattctttcaaccacgtttccttttttctctcattgatgtggtcatgttgtggtctcctctgtttatcttcagctatccctgatgagaggtgattatttattgcatgaatgagaccccctttttttcctcttccttgggatcctcctgccctccctactggaagcaacatgtgagaggcaggaattatgacaatatacaaacatatttcctgccaggggaccactataagaagcttacaacatgacccatctagaagtcacttacttccaggccagcaggggtgtttttctatgatgtgtctttttctcttaaaagcatctctaattaagtttagtccagtcaggataatctcccttttggtaaacacaaagtcaaaataacctaatttcatgagcaattaatttcctaccacagtaaatcacttttttttttttgagatggagtctcactctgtggtccaggctggagtgcagtggcatgatctcggctcactgcaaccttcacctcacaggttcaagtgattctcctgcctcagcctccagagtagctgggattgcaggtgccttccaccatgcttggctaattttgtattttcagtacagatggggtttcaccgtgttggccaggctggtctcgaactcctgacctcaggtgatccacctgtctctgcctcccaaagtgttgggattacaggcgtgagccaccgcgcccagccagtcacacttttttacactaaaaagataacaccgcaggtatgcaacagttgggaatcctggggatcatcttcgaattttgcttatccacctgaacagacttttcttttttttgagatggagtttcactcttgtcgcccaggttggagtgcaatagtgtgatattggctcactgcaacctccacctctcgggttcaagcgattctcctgcgtcagcctcctgagtagctgggattacaggcgcccacgaccacacccggcggttttgccacgttggccaggctggtctcgaactcctgacctcaggtgatccacccgcctgggcctcccaaactgctgggattacaggtgtgagccaccacacccagacctgaatagacttttcaaattctttcagttgcttttgttatctaagtaaacaaagatatctgcaaataatattaactacttcccaatttaattcattacaaatatcttttttctggcttaatttcttcatgtaccattttatagattcacacacacacatatataacaatgaaaatgtatccaattattctatttttgttaatttgtattataaatgagtattaaaataattcttttttgtttgaagggtttgtttgttattgtttttttttttttgagacagagtctcgccctgttccccaggctggaatgcagtggcgggatctcggctcactgcaacgtccacctcctgagttcaagcgattctcctgcctcagcctcctgggtagctgggattacaggcgcctgccaccacacccggctgacttttgggtttttagtagagacagggttacaccatgttggccaggctggtctcaacctcctgatctcaggtgatccacccacctcgccctcccaaagtgctgggattataggcgtgagccactgcgcccagcaacacagaactatttttataacatacaagtctttcaaccaataaatatttaaattatctcttaaaatgtggtacaaatacacaatggagtactattcagccttagaaaggggtaaatcctgtcatttgaaatatacatttgaagacattatgctagatggaataagcctgacacagaaagacaaatactgcataatctcatttatatgtagaatctaataaagtttaactcaaaaaaaatagaaagtgaaataatggttaccagaggcttgatgtggtgggaagaaattagagtttttgattgaagggtacaaagtttcaaatagacaaggtaagtagtttttgagatctattttacagcagcgtgactatagtaaaccacaatgtaattgtattttaaaatgactaagtaaatttcaaatgtcttaccacaaagaatgataggtaagcgagttgatagatgttatttaactcaactcaatcattccatattacatacatatattcaaatgtcacattttaccccataaattcattcaactttgatttgccaatcaaaaatactatccatactttaaagagaaataaactttaagaaatttgatgagaaaagtgttctttaaagagaaataaactttaagaaatttgatgagaaaagtgttcattttaaaatcttagaatacatacttttgcatatatatatatttcaaatggcttgctcctttaatgatgtaagtaaacttttttttttttttttgagacggagtctcactgtcacccaggctagagttcagtggcatggtctctcactgcaacctccgcctcccaggttcaagtgattctcctgcctcagcctcccgagtagctgtgattacaggcgcccgccatcatgcccagctaatttttgtaattttagtagaaactgggtttcaccatgttggccaggctgttcttgagctcctgacctcaggtgatccacctgcctcggcctcccaaagtgctgggtttacaggcatgagccaccgtgcccagccgtaagtaaacttttaatataatgaatagtctaaacccaacactcagaaataaaatgtttatttttaatgttcaaaatacaatactataaaagactctaaagcaactgcttacagtaccattatttctacgtttctaaataaattattccttcacttgttagttatttgaatatatattttaaactacatttcaacgtattaaatcaaatgaacatacgtacttggcaataaaaaatttattaaacaggtagacaagaaaacaacttgccttcttttctaattttaaaactgacaaacactcggcatttaggtgcttatttgtctagtgttactggagtgctaaagagaagtactcaatgggaaatctttccgtatttatatccatgctgggtgtgaatatatgggaattttccaagggtagtactataaacattcaactactattatatatagccccagattgactgattagaataaacatgggttacaaaccactgatgtggccaccttgtttttaggcttaacattgatcatgatctaacagaatcaacaaatgagagctatatgctgggtgctcttcgggcacctttatttgcattaattgctttaattttaccaaaatcctaaagttggggatgcaatcagtaaccagctgacaccgagtttcaatctaaccattacgcccaacaccctgtcacccaatgcttgttttaaatcctgacctaacattttggctttaaattttttaatttagtaaaaataaagataaatttacaaaccacttctttttatccatagatagtatgtagaacttaatttttggtttaaagtattcattacaaagtctgagacaaacacttcagtaagtgaattataacattattcctcttatgacttaaaagaaccattaattttacttttgaaataatgagtgtttatatttaaagttaaaatgagcctattattatatagaaaatttgttgtcagcatgaaccttgtcatccactgagtggtctacagttgctttcagaaacactaataagaatactgtttctgattgaataattaaagaatgttatgctttttcagtgactaaaataaaatagattgaaattactgattagtaacttaccatgtggtttaagtgttatttaataaatacatgtgaagtttctcttaaactcattttaacaaatgacttctgtttttcacttctattagaaaaaagtattaaaatttgttattacaagcctatcaattttattcagatctaaatatagcgctaatcttaaaagatctgtatgcttaggattataaaaagcctattctccattcacacatataagataaataactgcttttcagtaaacccaatggggcaactgtgactcacaattataagctattaaaatattaatactatcacctagatgacacttttaggtatctgcatgttcaagttgtttaacttataattcaaaaataattttttataaactataaaaaataaaaagaattttatttcttaaatattgtcattatttctagttgacttaacattcaattttagaggctgtggctttagaaacaagaaatgtcatggttgactccactttacttcctgccttatttcacacaaacacagcagcacaaaaaaggccagaaatgctacaacttgactggaaatacaccagtacctttctagggagaatatatgtgggagcatatttacttgaaattaatgacatcttttgttgaagtacaggcttctatatggcaagtaataaatacaaaaattttacagggcaaaagagtaagagatatactctaaaattaccttctaacccattatttcttttttcactagcatggttgtgacggaatgagcatttgcagcagctttttttttttttttttgagatagaatcttgctctgtcgaccagactggagtgcaatggcatgatctcagctcactgcaacctctgcctcccgggttcaagtgattcttctgcctcagcctcctgagtagctggattacaggcacgtgccaccacaccctgctaatttttgttatttttagtagagatgaggtttcaccatgttggtcaggctggtctcaaactcctgacctcgtgatctgcccgcctcggcctcccaaagtgctgggattacaggtgtgagccacggtgcccggcctgcagcacagtcttaaataacctacactctctgcttcatcatttttgagatatggccataagacatttatgattttattagaaaaaaatgtttcctttttctaattcagaaatttagcaaaatttcacaggtggatcatgaggtcaggagtttgagaccagcctgaccaacatggtgaaacctagtctctactaaaaatacaaaaattagccggatgtggtggcacgtgcctgtagtcccagctacttaggaggctgaggcagagtgcaattgtgccactgcactccagcctgagcagcagagagactccatctcaaaaaaaaaaaaaaaaaaaaagaaaattgaatctacaataactgtagtaattatactttgaaataaatttaaccaaaaagtggaaaaacctgtgcattataatctaaacaatattgaagtacaaaattaaataatacacaaatggaaaaatattacctataaatgaattagcattattattgttaaatatctgtattacacaaaataatctacagacataatgcaacctctatgaaaataccagtgacacactggtataaattttaaaacatacatctaaaatttatattgtaccacagaagacccaaagtagccaaagcaataaagaaaaaaaaaaagtgtgctttgggaggccaaggcgggtggatcacgaggtcaggagattgaaaccatcctgactaacacggtgaaaccccgtctctactaaaaatacaaaaatttatctgggcgtggtgtcgggcgcctgtagtcccagctactcgggcggctgaggcagaatggcgtgaacctgggaggcggagccgattgtgccactgcactccagcctgggagaaagtgcgaaacttcgtcttaaaacaaaaaaacaaagaacaaaacaaaaaagggtgaagatatcaccctacctgactttgaaatatactaaaaaagctatattagctaaaacagtatggtaattgaagaaaaacagacacatactccaatggagcaggaaccaaaaaaaagacaagaaacggctgatttgaagttacaactaagcccagcagtaatatttatggcttattacggagcatcagttacgcagcaaacactctcatgtttcttttttttttttttgagaaggagtctcgctttgtcacccaggctggaatgcggtggagccatctcagctcactgcaacctccgcctcctgggattaagcaattctcctgctgcagcctcccgaatagctgagatttcaggcacgtgtcaccacacagctaatttttgtatttttagtagagatggggttgtgccatgtttgccaggctggtcttgaactcctgacctcaggtgatctgcccaccttggcctcccaaagtgcagggattacaagcatgagccaccatacctggcctcactgccatgtttcttttgatacatttatatatataaacattctcatgacttatgaaacttccctagtacttacctaaaaaaaaaaaaagactcaataaataagtaaattcacttatgtcatctataaaaagtaaaaggacaataactaaagaaaagtaggcttatataggcatctgcaactaaaagaacaaaatggaatgttctaaataaaatacattaattatggaattacttctaaaaattatgtgcactactgaattttataaaaaacattcttataatcacgaccaactcatgtaatggatacttcataaactataaaacaaaaaattataacaagaaaattataggtctggcatgagtgccaggcaaagagtttgtatggcgagattctgaaccttaagccataaggttttacagtaatgaatttaatacaaagctgagagcataaatttgctttcagcatttttgaggtttttactagctagcaaattaatcaccttattaaaatgatttgttccgatattgctctattcttctgaaaataggtacaaactcatgctcatacaaacacactcactccataattttctttcctaaggtttagagtaatacatgcatatttttaactttatgtaaatcaaaattaaaagtctgtgtgtttgcaggcagagaggccacatgttcaaataaaaatatataagaaatttattaaaatacgtattcaagactcacaaatgtatgcattttattcatacttctaaataatataatcatagaaattaccctgtagtcaatgtctatttatttattcattttgagacaaagtctcgctctgccacccaggctggagtgcagtggcacgatctcagctcaccacaacctccacctcccaagttcaagagattctcctgcctcagactcctgagtaactgggattacaggcactcaccaccgtgcctggctaacttttctatttatagtacagacactgtttcaacatgttggcaacgctggtcttgaactcctgacctcaggtgatccacctgtctcagcctcccaaagtgctaggattactgacatgagccacggtgtccggccgtcagtaacagtttagttgtacattttaaactaacaaaaagtgtaaaattaaattttctgtaatacaaaggataaatgctagaggtgaggcagtcagtaacagtttagtcgtacattttaaagtaacaaaaagtgtaaaattaaattttctgtaatacaaaggataaatgctagaggtgatagatacctaatttaccatgaggtgattattatatattgtatgtatgtatcaaaatatgccatatgtggtttaaatatatacacatactatgtacccaaaaatattaagtaaatttaaatgagaaagaaaaaataaaaacttaacatacaggaacaacattctttaacttctttgcagtttaaagccactagcaaaaaagattactacaaatactactttattatgttaacaaataatatattgttaccatcttttacctacactctaaggtggaatgggttaaggttagcggcaaaataatgcttcattgaatgcacaatagtatttaacgtgttaaaaacgttaaattaaaaagttaagtctacacataatttcaaagttttaaaatgtactggattgtatcacataaaagtacaattagtaaaataatacactattaaattttaactaaaattaaaaatatttttctctcataatgtagagtattaaactgaacacctacttcatgcattgctcaatattataagttaatcacaaagagcatccctacttagattttcatcatacatcttacattttaatgtctttactctttcatagaagagagaatatataacgcccacctaataaaaaagaatctctcatatctttcatgcaggaacaattcatcacatactttcacatgtgaatacaataggaataaagaaacagcatgaatttgagagttgaattacatcattattcacgtatttaaaaagtctataaaattttttcaagaaaaaagtatactttggtggacacagtggctcacgcctgtaatcccagcactttgggaggctgagccaggtggatcacctgaggtcaggggttcaagacaacctgcccaatggccaagaccccatctctactaaaaatacaaaaattagccaggcatggtagctcatgcctgtcatcccagctacttgggaggctgaagcaggagagtcacttgaactgggaggcggaggctgcactccaacctgggtgacagagcaagactttgtctaaaaaaaaaaaaaaaaaaaaaaaaaacaaaagtaaagcctgaccaacatggtgaaaccgtctctactaaaaatactaaaaattagcaaggcatggtggtgcacgcctgtaatcccagctactcagaaggctgaggcaggagaatcacctgaacctgggaggtggaggttgcagtgagccgagatagcaccactgcactccatcctgcacgatgggaacaagactccatctcaaaaaaaaaaaaaaatgtaatttgaatgtaataactctccaaaatatcttatacactttttaaagttatatacaaaatatttatgtacaaacttcagttctcaattattttctaaactcagccctctgatttagtgtactgtctgaagtgtcagttccttagatatacctactctgaattgacatttacagacttaattttttcaaataattttttatattactgcatctgcaaaaacatattttagtatgaactctctggtgtttcctaggctgtagtttgtaaaaaaatgtttttccaaatttactacctttgcagagattttcttcaagataaattatctgatgttgaagaaagctggagcaactacttcagggttttcctctagaacaaaatgtgtaaaataagatctgtaatacaagtaatggtaccacaacactcttcatattagtttttttttttctttgagatggagtgcagctggagtgcccaggctggagtgtggtggcacaaactcagctcactgcaacctctgcctcccaggttcaagcgattctcctgtctcaaccaccgagtagctgggattagtcatgcactaccacacccacctaatttttgtattttgggtagagatggagtttcaccatgttggccaggctggtcttgaacttctgacctcaagtaaaccacctgccttggcctccaaagtgctgaaattacaggcctgagccaccatgcccagcttacactcttgatattttaatgcttgtcttcaaaataaatactcttcttcactttaaaggcttatattttctgaaaaatctattgacagtaatttcatctttaatgcttctattaagtatgaactctctgatattgaataagatgtgaacagatattaatggcttcttcacattctttacatttgcataatttttctcaagtatacatcatttcctgtccaataaagtgtcagcattggttaaaagttttgccacattcttcacacttgtagaggtttcctctactatattttacctacaatcaagtatgacaaccatttaaaggtgtttagaaatattgaggtgttgtcaactgcactgttatatctttcaggtttgtacggtttctctccagtaattctcttcgttggccaggatggtctcaatctcttgatcttgtgatccacccgccttggcctcccaaagtgctgggattacaggtgtgagccaccacgcctggtccatttttcttatttgtcagatttttctacagcatgaattttcttgtgtgtagtaaggtttgagcattggttaaaagctttgccacattctttacatttgtagggtttctctccagtatgaattaccttatgtttagtcagagttgaggaccaattaaaggctttgccacattcttcacatttgtagggtttctctccagtatgaattatcttatgttgagtaaggtttgagtattggtaaaaagctttgccacattcttcacatttgtagggtttctctccagcatgaattatcttatgtctagcaagtgtcgaggattggttaaaagctttgccacattctttacatttgtagggtttctctccagtatgaattttcttatgtgttgtaaggtgtgaggataggttaaaagctttgccacattcttcacatttgtagggtttctctccagtatgaattatcctatgttcagtaaggtttgaggaccgcttaaaagctttgccacattctttacatttgtagggtttctctccagtatgaattatcttatgtgtagtaagttgtgagaactggttaaaggctttgccacattcttcacatttgtagggtttctctccggtatgaattcttttatgtgtggtgaggtgtgaggatgtgttaaaggctttgccacattcttcacatttgtatggtttttctccagtatgaattctcttatgttgagtaagagttgaggacacgttaaaggctttgccacactcttcacatttgtaaggtttctctccagtatgaattctcttatgttgagtaagggttgaggacacattaaaggctttgccacattcttcacatttataaggtttatcaccagtatgaattctcttatgtttagtaaggttcgaggattggttaaaagctctgccacaatgttcacatatgtagggcttctctccagcatgaattatcttatgtctagtaagggttgatgattggttaaaagctttgccacattctttacatttgtaggcattctctccagtatgaattatcttatgtgtagtaaggtgtgaggatatgttaaaagcttttccacattcttcacgtttgtaggatttctctccagtatgaattatcttatgtgtgttaaggtgtgaggacttgttaaaggctatgccacattcttcacatttgtagtgtttttgtcctgtatgaattctcttatgttgagaaagggttgaggacacattaaaggccttgccacattcttcaagtttgtaggaattgacagtagtgtgaattcttttatgttgagttaggtgtgaaagaacacaaaatgacttgccacattctttacatttgaaaggattcttttcagtcttatgtctatttgaatttgaaaatttatgaaagtctttcacatatttatcacactgaaatattttgctctgggtagttgtcaaacactggttaaatccattataacttcctttgtgcaccttgtactcatccacacttttatagcctttttttaactgtaaattgtgatgtccacatttttcatattttctcagtattattctttgcaaagaagcttttatgctctgctctggccgaaggtcttgggcaaaataacaacacatacctgaaagaaataaaaataacaacttactccacatactagactcagatacatattctttacacatctaacctacaaaactatacaaactacataaacaagattgcataagaaggccaggcatggtagctaatgcctgtactcccagcacgttgaaaggctgagatgggcagatcacctgaagtcaggagtttgagaccagtctggccaactggtgagacccatctttactaaaaaatacaaaaaaattagccgggcatgatagcatgcacctgtaatcccagctactcaggaggctgaggcagaagaatcgcttgaacctgagcggcagaagttgcagtgagctgatatcacaccaaggcactccacgctggagaacagagcaagactttgactcaaaaaacaaacaaacaaacaaaaaactgcataacaaaataccaaagaccctaatttccttatagacatataaatataagaaaaatacacagaccaaaatacatttgtgaaaaatttataaatgagttaagtgtgtacagtgccccaggaggtgagtacaatgcaaagagccacaaagaaaaagagaaaagtctgttatatttacctaacacagctcatccctctccccaatataatatagtgcctttagaagtgaacacccagccaggcagggtggctcaggcctgtaatcccaacactttggcgtgccgggtgggccgatcacctgaggtcaggagtttggaaccaccccggccaatatggcgaaaccccgtctctactaaaaacacaaaaattagccaggtgtggtggtgggcacctgtagtcccagctacttgggaggctaaggcaggagaatcgcttgaacctgggaggcagatgttgcagtgagccgagatcacaccactgcactccagcctgggcaacagagcaagactccgtctcaaacaaaaaaacaaacaaacaacaacaacaaaaaaaaaaccccaccaaatctgttgacaatgctatgaaaatgaaacttatgttgattgttgatggaaaccaaggatgcagccattattttaaaatgttatgtttcacacataattaaaaatagaattataattaaatacagcaatcccatttattaatctatatccaaagtatgcaacacaggacctagaagagatatgtaaacatctatctttattgtaccagcattcacaaaagccaaaaggctgaagtaacccagatgtcttttgattcataaacgtatcaaaaaatgtgacatatacatacaatggaattttattcagccttaaaaaaatcgtggccgtgcatagtggctcacatttgtaatcctagcactttgggaggcagaagcgggtggatcacctgaggtcaggagttccagaccagcccgggcaacatggtgaaaccccatttctataggatacaaaaaaatttatccgggcatgatggtgggtgcctgtattccccactactcaggaggctgaggtggcagaattgcctgaacctgggaggcggaggttccaatgagccgagatagcaccattgcactccagcctgggcaacaaagcaagactccgtctcaaaaaacaaaaaacaaacaaaaaccacttgtaaaattctaagataaactttgagaatattttatcacctaaaataagacagtaacagaatgatgcatactatatgattccacttatatgagatatgttataaagagtcacactcataaaaacaaagtagaagagtgtttgtcaagggctgaggagaggggaaaatgggcagttgttacttaatggatattgagttttcattttacagatgaaaaatttctagaagtgttttgcataaccaggtgaatatactgtcacccaagctgaaatacagtggcaagattatggcttactgtagcctcaaactcccagcctcaagtaatcctaccccttcaattccccaagctgctaggaccacaggcgcaccccaccccatgcctggttatttttgaaaaaaattttctagagagagggtctttttttttttttttttttgagatggagtctcgctctgtcccccaggctggagtgcagtggctgaatctcggctcactgcaagctctacctcctgggttcacgccattctcctgcctcagcctcccaaaaagctgggactacaggcgccctccaccatgccaggctagttttttgtatttttagtagagacaaggtttcactgtgttagccacaatggtctcgacctcctgacctcgtgatctgcccacctcggcctcccaaagtgctgggattacaggcgtgagccaccacgcccagcccgagagagggtctttacgggtgggccaggcttgtctcaaacttttgggctaaagtgattctcttgtcttggcctctcaaaatcctggaattacagatgtgagccaccaccatgcatagtcctaatatgtacacttaaatagatttaagatggtaaattttatgtcatctgtttttacaacaattttgtagaagaagaaccgaaaaaagtaaagaattatgaatcttttcaaaaattaacttcaaataacaaaagtgatctgaaaggaacacaaaggaaatgtacattcattattaaacacagtgtagaaataagattattttcacaactactcacttatataagacaaaacaaccactgaaaacagctaagaaaaaatatatacaagataggccataaccataattagggtcatatttataaataaaaaacacacacatatataatctgattgtgatagacatatagctcatttatttcttaattaagccctatgttgacttaaagtgtacagagttacaaattgtctaaaattttaatatgtaagtaaaaccaaaaacacaatagattcattttaagaaaccaacactaaaaaaaacacataaagaactgcaaaataataagggaaatgtttactcaaactctggtaagcaacattaatggaccattaaaaaagaatttgtctagataactacaatatttgactgtaactgtgtactcatggaaggcaggtattatgaatcactggcattaactatatggtagttaaaatttcagagaaaatgcagtataaccataaatagaagactctaatgagaaacttttaataaataagcattataaaaactagaggtagttttcatgttttaaatgtatgttattcttatacaaaatgaaactgctgtaattcaaatttagaagcaggccaggcgtggtggctcacgcctgtaatcccagcactttgggaggccaaggcaggtggatcacttgaggtcaggagttcgagaccagcctggccaacatgatgaaaccccatctctactaaaaatacaaaaaactagccaggcgtggtggtgcatgtctgtaatcccagctacttgggaggctgaggcagaagaatcacttgaacccaggaggtggaggttgcagtgagccgagatcatgccattgcactccagcctgggcaacagagtgaggctccatctcaaaaaaaaaaaaaaacaaaaaaaaacaagttaaattatattgctaaattaaaaagaaataaatatatttttgcagaatataattaaagcctctgatatataaaacaaatatttgggaataaattatgtttttatttagatatagtctgaagaaagtgggtgcaaatcctgtaattcctatttgcctgcagcaaacaaatgtataagtaactattttagtaaatatggagtgcctactaagtatctaatttacttcaggcataacatttaaattctgacatatgtgtcaatctaaaattaattctgacatatgtgtcaatctaaaattacagacaaatttgaaatagaaaatagaaaaatgaatagagtgacattagtttgacggaaaaataaaaggtgacctattttcttaacccgacagcaagaaaatttgtcaggaattcctgacaaaaatgcctttatgagagagccaagcatcatgtctcacacctgtaatgacagctatatggtacactgaggttggagaatttcttcaggccaaaatttcaagaccagcttggggtatatagcaagtcctcatctccaaaataagtgcctttaagagagctttaaaggccgagtgtggtggctcacgcctgtaattccagcactttgggaggctgagacaggtgggtcacctgaggtcaggagttcgagaccagcctggccaacatggtgaaacactttccctactaaaaatacaaaaattagccaggcgtggtggcgcatgcctgtaatcccagctactcgggaggctgagacagcagaattgatcgaacccagccgggaggcagaggttgcagtgagccaagatcgggccactgcactccagcctgggtgacagagatgagacttcgtctcaaaaaaaaaaaaaaaggctgggcgcagtggcttatgcctgtaatctcagcactttgggggactgaggcgggtgtcgatcatctgaggtcaaggaattcgagaccagcctggccaacatggcgaaaccctgtctctactaaaaatacaaaaattatccaggcatggccgggcacgatggctcacacctgtaatcccagcactttgggaggctaaggcgggaggatcacctgaggtcaggagtttgagaccagctggccaacatcgtgaaaccccgtctctactaaaaatacaaaaattagccaggtgtggtagcatgtaccagctgcttgggaggctgaggcaggagaatcgcttgaacctgggaggaggacgttgcagtgagctgcgattgagccactgcactccagcctgggcgacagagcgagactccaagccccacttccaaaaaaaaaaaaaaaaattttccgggcatggtggcgcgtgcttataatcccagctactggggggctgaggtaggaggatcacctgaacctgggaggcggaggttacagtgagttgagatggtgccactgcactccagtctgaggaacagagtgagactccgtctcaaaagaaaaaaaaaaagagagattgagagagagagctttgagatccagggagggagttgtgaaactctgataatgcccaagactgaggagcatccttttcagaaggcaggcattcattcaggtggtaaactacaggacctctgttcttggctacagactgaaaaatagcctacccaacttggtcccactgagaatactgaacttaccccgtaaccatctcaaactcctcccagtcacagtctgggagaggtcctgcccttccagaggcctggaggaagacacccatttatagccatgcaggcaggtttgcaagaccttagcctttactgtggtccctgaagcagttccatgactcagttcaaggccagttctgcctacacagaaacctacacagtgacctggcaaaatcctctttgatactaagtgaaagccatactcattcacatcctgatgtaaggctcaccatatgcagacctgactacagaaacctgcctagtgtctgccctacagatcaaagtcctgaaggatattcagcctgtccaaaaataaaatgcaaattacaactacacaatccccttgtaacaaggcaactaaaggtaaacccttgtgcagacatagcagccttgtgagcaacctacaacccctcttcattacaaacccatagggcatcccattatcctgggtgcccaacaaaagatcttttacctcctgtaaccagtttataaaaacttgaagaggtgtttgtttcttgaaattcacagacaccagtgcaaaactatattgtgcccagtgtcaatgcttctattttaaaatagcactggaagtatgtagcagaataattagaacaacttttaaaaagccattaaaattgaagacaaataggtaaaaagttgctgtttgtagatcatataatctcatatataaaaaatcatacacagtacatttaaacaggtctaaactaattaatatactcagtaaattagcaaaatataaaattaacatacatttataagatacggttccataaacttaaactatctgataaaataaaggaggaaaacaatcttattgataatagcattaaaataataaatttcttagaacaaatttaaccaaggatctaaaaagcctttacaataaatgatgtatcaatggaggaaattagaaaagacacaaattttaaaatattttgtgtgtatggattgaaagaataaatattgttaaagtgccatattatccaaagtgatctacagatttaataaactccctatcaaaattccagtggtatttgttttcatagtaatgaaaaacacaatcataaaatttacttgaaacttcaataaactctgaataatgaaagcaatcttgaggaaaaagaacaaaggatgaggacaacgtactttataatttcaaactatatttcaagactatagtataaaaacaggaaggaatgtgcagaaaaaatgaacaaaaaaaatgaaacagaaaccactactctcacatatttcagacatgatgtagaaagaaaacttaatagtttaacacagagtttcttaaaatttcacagatatttatgtgtccaccaaaacattaaaaaagcagattttgtagtcttgtatatgccaaaaaggggactttggttctcactgaaaacttgaagaaagataacggaagggaaagtatattccttagaaaagttagaaggataagacaaaagatacccctatgtaagagaaaaaataaaataaactattttattttcccagaaactattttccttggagcacaactcccaaattgtatttcttatttttattcgtttatttatttatttatctgagacggagtttcgctcttgttgcccaggctgcagtgcaatggcgcgatctcagctcaccacaacctctgcctcccaggttcaagcgattctcctgcctcagcctcccaagtagctgggactacaggcatgcgccaccacacccagctaattttgtatttttagtaaagacggggtttctccatgttggtcaggctggtctcgaacacccgaccttaggtcatctgcccgccttagcctctccaagtgctgggattacaggcatgagccaccacacctggccccaaatcgtatttcaaaaactgactttctccttgacatttggacctctcatctgtgtcatctgtcatattcactctcacctacctgggggtttggccaccatctcatgtctctccatattccagggctctttgccttgctccagacaggtgatcaggtctggcttagagacagcaatacctgttttattaaaaataaataacatgaatgttgctcatattctttaaataatgtgctcagtaaaaagggtgtaattaatagaatactaaattaattacaaaatacaaatttaaaacaaatttctaaatatttagacactattttaaatttgtaggtccttaattttactacttagtagtactgaatcaaaaactggagatgacaattagattttaaggtatagaaaacaatattttatgccactaaatttctggaattaccactaatttagagtgaaggatacagatcagctcaggaatataaaaagtccagatcacaatgaaacatcttgaatttttttttttctacattgacaaatccccaagattttctttctctccctttttttttgagatggagtctcactctgccacccaggctggagtacagtggtacgatctcggctcactgcaacctccatctcccgggttcaagtgattctcctgcctcagcctcccaagtagctgggactacaggcgtgcaccactacacctggctaatttttttatttttttaagtagaggtggggtttcaccatgttggccaggctggtcttgaactcctgacctcaggtgatccacccgccttggccacccaaagtgctaggattacaggcataagccaccacgcttggcccccaagattttcttagaaatagagatctgatactcatttatgcaaagatcaattaccaaaaaacatcctacaaaaaaacaaacgaaatatttagggtagattaggaattgtgtattgaagttattctcacccaggaagaccaggtttctgtagttctctaacatcacgttcctatataaattctgctgtgcagtgtccaggcattgccactcctccacagagaattctatggccacatccataaatgtcaatggtccctgaaaagtacacacacacatatttacgaagtggccatgggcaaaatttttaatttgattcaagttgaaatgaaagactaaggagtactcattctgacttataaaagtgaatgaaattatccaaatgaagtaattttaaagacagaaatattctctgatgtactctctaactctgagaaaagactagaataagatccacaacatcaatttatatatgatacttttctggataataaaatataaaattaaggacatgaacacaggcatgtacattctggagtgctatattcacactataaagaatgagttctgttgagatgaaagacatgtcgagttacaaggtacatctcaaattttaatgtgtacaataaactggaaatcttgttatgctttttttttttttgcagaagatctggaataaagtctgagttgctgaatttttaataagctcacaagtaatgccaatgattttgccccaaagaaaaatattttatcaaacatccaacaagtgaaataacctgtttttccccccagtttttatggcctataagagagagatgacagccttcattttccaaaaacagatatatgcaaagaaaccctaagaaagaagagcagctgtcagattacatttgataatttatacaaatcagctgcacaaagatacttaataatgaagaaaaaataattaactgtatagtgaaaaaatctgtcagacagctctttaaccaagtgaatcattagcctcaactgcactaggacaaatttttacggtgtgctaaaacacacagaaggacacacagcatcactgctggaatattgttcccaataagtaaattatagtctaaattcaaccatatggaaacatcagttttatgcaaagttcaagatacaggtatcttctatcttgatacaggatatcttaagatacaggaatcttctattcaagatacctgtatcttctatgttctgtaatttttaatagtgattttaagtagtctttctttagcaccctagagaacaggtatctcctgataatttttttcagaactttctgagtaataaatgccatcctgtttaaataagcattttcttaattcggttctgcatagggctaatagcaaacacaaatggaacttcaacattacatgttctccatctttactaaggatcccagcttttccccaatagtaatcttgagtatccacacttttctaagttcaacagccacaaaaagaacacttttaatactgcagatcataaattaatggtgataattttgcaaggcatataaaaagccaaaatgtaaaaaatttagagaaggctctggtatataggaaagaaatatttttcttgattatcataagaattttaaaaagtagttaaaacaaactcattagggagaaaaaaacacaagtatagaagtcaaggtttgcaagtactaaacacacagcattccggaggcagggcggatacagctcttgatccgagacatgtttagctgaaaaaaaaaaaaatgccactttttcctctatctcctccttctcttggatttattttcagatgagattttctggacaaattacacctgcatcttgagaaaatgccacctgtttacatgctacgaccacacccacaggcagaaggaccaagaccctcagaaaaagtccacccatttctgggtgaatcttcagaaaagattcagaaacaatgaagagaaaaatagaagtttctcctttcctgtccttaggtaccctccccaccaaagacaccagcaatttctgctacaataatggaaatatgggccacgctgccctgtctttaccaaacccaaacagaacaggccctgtgaccatccttcagtggaaaagtaaaacttaactctcatgaatgtatcttgaacccctcatagttgattctggccttaccttagagtcacatgaggcacttaattaaaacaacataaatgtgtccacacaaaacaataaacagaacctgtgaagaaggcacaagtaaagggatttctaataattagccatgtaatttgagtgcctacacctaagtaatccaagttacttagaatggcaaaaacgtcaattaacttttccaccaacctaatagaagtccagctgataaccatttagctaagcattgccttgcaattttttttttttttagacggtgttttgctcttgtcatccaggctggagtgcaatggcacaatctctgctcaccacaacctccacctcctgggttaaagagattctccagcctcagcctcccaagtagctgagattacaggcatctgccaccatgcccagctaatttttgtacttttagtagagacgggattttaccatgttggacaggctgctctggaactcctgacatcaggtgatccacccacctcggtctcccaaagtgctgggattacaggcataagccaccacgcccagctgccttgtaatatttaataagcttataaatcacttggtaactttggaccttccctatgtattttgattctgcaggttttcaaagggttcatgaatgtgcgttttaaataagtcccctgtcaatgctgatgttgcttcttctaggctcatcattagaattggttagagaagcaggcacagtacagagtcccttacactcagcactcttgtcacaacacaaatacttccggcacaaatgaagacaacaaatctccatctttaagtatcatattctttgctggttctttaaagtttacagaggcaacagaaagtagcaatgcctgaataagtctgcacttcgaaaacaacatgtactattgaaatgtttataaagcaggtactatgtgctcaagagtatgttacagagcactgtgcttggaataacacattatgtgatttaattctcataacaaactgggagtcagcacagctgtttaataattcccaggatttagattaaggcttagcatttttatttcatcttctgtttctctgtccttggtttttttaaaaaatgtatagaacactaaatatagacagatgacagggatacagaaaggaagaatttaatgtagtttaaagaaatttttattgtgttcatatttacttgtttgtgacttgtggagcaactactggatctgcagaatagaaaacaagttgctaaatgtccctgcaagcactggtttaatagaaaatttaaaaattaagatgctaaaatacatactttatttttccaattttatctgcttttgggtttcagaaaattgtgagcaccagctctaaaaatttaacagactcactagtcaaaacttccaatcagttctgtgaggccagacttcaaggtggggccagaccgaaataagaagtaaaatagctgattgctaccctgtgaagtttgtagaaatctgaagtgactggaagcctgagaggaaaaggcccctctagagtaaagtttggctggaaccatatgtgttcatatcacctctagtaattctagacagtgtttggaaaatataattaaaagaaaaaatttctccagccctagagaaactccaaaatgatagaacagaaagtaaactgtttcattacacaattaaaccagaatgtgacatgcatcacagtcaatcttcttaagagattgcaaagacaaaaagacactcccataattagtccacaagtaaaagaatttatagcaccatgtaatacatggttcatcctaaattcacctggtaatgggggaggtgatccatgtatgctaattggttataatcaatgacaaaattaacttttcacatcctcatgacaggaggtaattttgcaacttagggagttatctttttggctatttacattttaagcaatcaatggctctgtactccctgagcactatactctgcttgccctttcctgatagccagtgtcctttcttgactcctaccacagggctcacagctggcagctcacatcttacacgaaccccaactgccagagcagcactccagtcccacatcaggtaatgaagcctgagccagccctcctggctgaaattgcaccttcacgataatgggaatgggagcagtgtttcagcttcagtttctatttataatagtgacatgaaaaaaatactgctggattttcagcatcagtccgcatagagatacctctaagagttctccctgtgacagcccaactcattcatgacaccatgggatagtaatagagcttctgaaacagacacccaaagcattggagagaaaaatcgctcttcatcttagtaaaattatactcagtaaaaaagaagaacatcttaaaaaaacactcagattagatataagattgatcatgttggccagaaaatgttcccctaaaataaacgtctctctaaacacccaaactgcacagctactctcagcatgagaagcatgagcattatgaagaaaggggacatattctcagcaaaattttataaagtttctcttttatctctgttgctctctcgtctcctagccattaaatggaggatttatattggaatacatctgacaatttccaacagctcctttttatttttattttttttttgagacagagtcttgctttctcacatatgctggagtgcagtggcatgaccttagctcactgcaatctccaccttccaagtttaagcgattctccttcctcagtctcctgagtagctagaattacaggcacccaccaccaccccccgctaatttttgtatttttagtagagacagggtttcaccatattagccaggctggtctcaaactcctgacctcaagtgatctgtccaccttggcctcccaaagtgctgggattacagaggtgagccacagcacccagccttcaccaacgttttttgatgaagaatcagaatctgactttgtttatatagtaaaatatatttgagcttacaacacagctaacttaaaagctattatatttcttgcatggtcacatcacccatcacatttatttgtactgtaatagcagtattcgagtttagtaaaataaaagatactgaaatcatgcttacctatatctattgggtaaattaatatgcatgtcaggctaatatctactgtaacaattttgtagtgaatttttttggatattagatataaatatctaagcataaataattttaatgtactagtaataatgtagaattttaaaaaattttctgtaaccataatttagttataatactttatatttcaaaagtatgacgaatattaaaatgactaagacattcatccaaaataaatattgtggtcttatattcataatattgtagaaaataccgtataatttaggtcgggcgcagtggctcatgcccgtaatcccagctactcagccgagatcacgccactgcactccagcatgggcaacagagcaagaacccgtcttaaaaaaaaaaaaaaaagaaaatactgtataattcacacaaatgcaagttgtctacaaacactacacataaccatgctaattgttttgaagcagtaaataggaaccaaagcataaccaaagactccactgttgagtttatacactgaactgttctttcttttgcagtgtaagtacttcagcctgcaaatattggataattacactggataatcagttttttgtcaaagaaacttcctctgcatcttttagtctttatcattctgtattgctaagtttaatcctatctttgtgctccactttttgtgtgctcttaaaatgagctttaatctagacaaatctgtatctactttaagagactgaaaacaacaacaacaacaacaacaaaaccttgtaatcccagcactttgggaggccgaggtgggcggatcacgaggtcaggagatggagaccatcctggctaacacggtgaaaccccatctctactaaaaatacaaaaaattagccgcatgtggtggtgggcgcctgtagtaccagctgcttgggaggctgaggcaggagaatggcgtgaacccgggaggcagagcttgcaatgagcccagatcacgccaatgcactccagcctggaagcgagactccacctcaaaaaacaaaaaacaaaaaaacctttgccaaagcaaaaacactgcaatggttctgaggtcctagataaagacaatcctgagtcagaaagaatgacaaaaggtttctttagctgtaaatatgatttacatatatttcagaaaagcagagaatatctacatataagcaaaatgcttcaataaagagagatgaacaaaatatcctccctttttataaggtaagaaaataaagactcttatttctaatttatattttctcctataaaagccaaatctcgaccaggcatggtagctcatgcctgtaatctctgcactctacgaggccgaggtggttagatcacttgaggtcagaagaccagcctggccatcatggcgaaaccctgtctctactaaaaataaaaaattagccgggcgtggtggcatgcacctgtaatcccactactcaggaggctgaggcagaagaatcacttgaacccaggaggcagaggttgcagtgagctgagatcgtgccactgcactccagcctgggcgtcagagtgagactccatctcaaaaaacaaaaacagctaaatctctggacaagttcttgatctcttggacatctgaatttcagcagactgtaggttcaggcatctaaggagtagccttgggcacactaaagaaaaaagcagaagagagaaaggtgttctaaaaaaatccatgagtgcatatgaataaagcaagttcttacggagagctatgaagagagttggattctgacacaataatagtgggagactacaacaccccacagacactattacatcattgaagcaaaaaaattaacaaagatatcaggacctaaactcaacatttgaccaaatagtcctaactggcatctatagaactgtccaactgaaatcaacatagtatacattcttctcatcaccacgtcacatactctaaaattgaccacacaatcagaaataaaacaatcctcagcaaattcaattttcccaaagtcataccaaacacacacttaggccacagctttgtaacgatataattcaatacaaagaaaaccacttcaaattatccaattacatggaaatttaaaaaccttcacctgaatgacttttgggtaaataataaaattaagcagaaatcaataagttctttgaaacaaataagaagaacaaagatacacaaaccagaatcgctacaacacagccaaggcagtgttaagaaggaaatttatagcactaactactcacatcaaaaacttagaaatcaatttaaatacctaactctactaaaaatacaaaaattagccagtcatgggggcactcgcctgtaatctcagctactcgggaggctgaggcaggagaatcccttgaacccaggagacagaggttgcagcgagccaagattgttccattgtactccaggctaggcaacgcagcgagactgtttcaatcaatcaataaagcaagagaaaaccaattcccaagctagcagaagacaagaaataaccaaaattagatctgaactgaaggagatttagaaatgaaaagtcatagaaaatatcaagtaatccaggagttaaatatttgaaaaaaattaagaagataaaccgctagcaagattagcaaagaaagaagatccaaataagcacaattaaaaatgacaacagggggccaggtgccgtgactcatgcctgtaatcctagcactttggaaggccaaggaaggtggatcacctgaggtcaggagtttgagaccaaccagcctggtcaacatggtgaaaccccctctgtactaaaaatacaaaaattacccaggcgaggtggtgcatgcctgtagtcccacctacctgggaggctgaggcaagccaattacttgaacgcaggaggtggaggctgcctgggcaacagagcgagactctgtcaaaaaaaaaaaaaaaaaaagataaggacaaaacccaaaaaggatgaaaactgagaatggcactaaggcccagagttttggtcgcactctgaccaaaaaatgagaatggcactaaggcccagagttttggtcgcactctgaccaaaaaaggagacagttttaaacaaaattattggacgacattattctggactgagcttgtgcactaggtccaaacagacaaacctaaccaaaatggagtcactgatgcttaaatgtgacataatggaactgaacatttaaggaaagtggtagatgctaaaacaggccaggttttgtctgtcttttgtaaacagcagatttaagcacataattgcttaaaccaggaaggcgaaggttgcggtaatctgagatcattccaccgcactccagcctaggtgacagagtggattccacctaaaaaaaaaaaaaaaaaaaaaatggcaacagaggccaagcacagtggttcatgcctgtaatcccagcactttgggaggccgaggcaggtggatcacctgaggtcaggagttcaaaaccagcctgaccaacatggtgaaaccctgtatctactaaaaatacaaaaattaggccaggtgtggcggcatatgcctgtaatcccagctacttgaaaggctgaggtaggaaaattgcttaaaccccggaggcagaggttgcagtgagccaagatcacgccagtgcactccaacctgggcaacagagcaagactccatctcaacaacaacaacaacaacaacaaaaaaaaaagactacagagacattacctctgaccccacaaaaatacaaatagctattgaagtttactatagacacctctgtacacaaaaactagaaaatctaaaggaagtggataaatttctagacaaacaaattctctcaagaccaaacaagttgaagccctaaatagatcaataacaagctccaaaattaagttagtagtaaataggctaccaactaaaaaaacccaagaccagaaggttcacagctgaattctaccaagtataaaaagaaaagctgatataatgccttttaaaactattacaaaaaattaagaagggacttctccccagctcattatataatagcatcattctgataccaaaacctggcagagacaaaacaacccagaagaaaacctcaggctaatatccttgatgaacattgctgcaaaaatcctcaacaaaatatgggcaaaccaaatccagcagcacatcaaaaagctaatctactataaccaagtaggctttatcgctggaatgcaaggttggttcaacatacaaaaatatcaataaatctgattcacataaacagaactaaagaaccacaaaattatctcaatagatgcagaaaaaacttccaataaaatgtaacattgttcatgcataaaaccctcaacaaactaagcattgaagatacatacttcaaaataatgagttatctatgacaaatccaaagccaacatactaaatggacacaagctggaagcattccttctgaaaactggcacaagataaggatgccttttcttaccgctcttattcaacagagaattggaagtcctggctagagaaatcaggcaagagaaagaaagaaaatgcacccaaacaggaagggaggaaatcaaactatccctgttttcagatgacatgattcagtatctagaaaaccctagttttggcagaaatgctctataaactgacaacttctgcaaagtttcaaaatacaaaacaaaggtgcagaaataagtagcacctctatacatcaacatacaagccaaaagccaaatcaaaaacacaatcacattcaaaaatgccacaaaaagaataaggtatctaggaatacagctaaccagggaagtgaaagatctctacgacaacaattacaaaacactgctcaaagaagtcagagatgacacaaacaaatgcaaactatttgatggtcatggacagagaagatcaatatcattaaaatggccatactgaccaggcatgatgactcacgcctataatcccagaactttgggaggctgaggcaggcagattgcctgagctcaggagtttgagaccagtcaggacaacataaagaaacccaatttctacaaaaaaaatactaaaagaaaaattagctgggcacggtggcgtgtaatcccagcactttgggaggctgagtcgggtggatcacgaggtcaggagtttgagaccagcctggccaacatggtgaaaccccctctctactaaaaacacaaaaattagctgggcttggtggcacgtacctgtaatcccagctacttgggaggctgaggcaggagaatcacttgaacccagaaggcagaggttgcagtgagccaagatcacgccattgcactccagcctgggtgacagagcgagactccgtctgaaaaaagaaaaagtaataataataataataataataataatacaggccgggcgtggtggctcacacctgtaatcccagcactttgggaggctgaagcgggtggatcatctgaggtcaggagtttgagaccagcctgaccaacatgatgaaactccagctctactaaaaatacaaaattagccaggtgtggtggcacatgcctgtaatctcagctactagggaggctgaggcaggagaatagcttgaactcggaaggcggaagttgcagtgagccaagatcgtgccattgcactccagcctgggcaacaagagcaaaactccatctcaaaaaaaaaaaaaaaaaaagaaagaaagaaagaaagaaaatataatatgtaaatatcatggaatactgtatgaccataaaaaaggaacaagatcatttcatttgcagtcacatggatgaaattgaagcccattattcttagacaactaatgcagaaaggccagccatggtggcccacacctgtaatccaagtacttttggaggcaaggagggcagcttccttgaggtcaggagctccagaccagcctggccaacatggtgaaacgccgtctctaccaaaaatacaaaaactagccaggcgtggtggcttgcctgtaatcccagctattcaggaggctgaggcaggagaatcacttgaacctgggaggcagaggttgcagtgagctgagatcgcgccactgcactccagcctgagtgacagagcgagagtccatctcaaaaaaaaaaaaaaaaaaaaaaaaaaggtaaactgatgcagaaagagaaaaacaaatgcactatctcatttataagtaagagctaaataataagaacccatggatgcaaagaggggaaaaacagacacaggcctagttgaggttggcaggacaaagacctgtttgggccgggcgcggtggctcattcctgtaataccagcacttttggaggctgagttgggcagatcacctgaggtcaggagttcgagaccagcctggtccacatgatgaaacctcgtctctactaaaaatataaaaattagccgggcatggtggcaggcacctgtaatcccaactacttgggaggctgatgcaggagaatcacttgaacccaggaagcggaggctgcagtgagccgagatcataccattgcactccagcctggacaacaagagtgaaactccatctcaaaaaaaaaaaaaattaaattaaataaataaaaaaaaaaaaatacctgtttggtgctatgcttagtatcttggtgaaaaaataatctacatcaaactttcatgacacaatcttacctatgtaataaacctgcatgtgtacctctgaactaaaattaaaagttgaaaggaaaaaactcgacgggtgggggtaagtgcaatatgtaaactgaaagattggtttgtgctatttatttctgggtccatgcaggcacgtgagattatgaacaagtggcccagaaccctaagttggtggggagaacaggttgctgctgcagattcggtgtctggggaacaggaatatgccgggagactcgtagacacttttgaaggatttttgcaagaaatgctaaatcaaaaatgctgtggtgaagttcctgagggtggtgccttgtcctgagaggggtgtggatgcatcagtgtctagtgggcatgattgtgagtcggtgggaatcctgtggtggcaactgtggaaagagaaggtctgtcatcagagattctttcctctaagttttcagtcctctctcactctaagagaagacctggaatcagaaaacaatgggcagtgtgacagccagtacataggagcagagcctcccattcccagacactcagttttattccaggctagaccttttatggtatttttattctggcacaaaatctatagagtttgctgaacaccaagcaactctccaacaccaattctttatctaacatttaaattctgacaccacccagagtcagcacagatgctgattcagggcttggtctcaaaatattgttcttactacagttgccagtaacaaaccccatgggcccatttatgcttctaaattatgagcccattatgagctactgtttaaaaattcaggactcccataaacttgctcaagttcaataacttaatagtgctatacacagtacttagaaaaacactgtagttatgttgaccggattattataaaagatacaacccaggaaaagtcaaatgaaagaaatgtgtaagacaaagaaaagaggtggggagagatgaagcacgtaggtaatcctggtaaatggctataattaataaaattctccatcttttgtgtgctccagaaacagtttatggaaagaaacacacatcccattatgacttagatgatgcactcttttcttacctatcacatagccagacatagattctgcccattttcttcttattctcttagaaaacccagctgaatttgtcttcagtggtcaaaataaaatactacttaatcaaacaagtttatctccttcccacagctcctgaacttttgagctaccctcagtctaagccaacatacaaccccattatatgctcctcctaagaacattctctgatttagccaggtgcggtggctcacgcctgtaatcccagcactttgggaggccaaggcaggtggatcacgaggtcaggagatcgagaccatcctggctaatatggggaaaccccatctctattaaaaatacaaaaaattagccaggcgtggtggcgggcgccagtagtcccagctactcaggaggctgaggcaagagaatggcgtgaacccaggaggcggggcttgcagtgagcagagatcgcgccactgcactccagacctgggcagcagagcaagactccatctcaaaaaaaaaaaaaattatctgatttagaatctgattttttcacccttcatttgccattcccctcccaccttgtttctcatcttggttgctccttaatatgaaaaaaacccacccttgtctgcctaacctttgagatccttaaagaccttataattggtacttcctcctgttccaatactcctttggaacttaattttttaaatataaatctaactttatatttaaaagtctagaaacgcctcaaagcaagaacaactttatcttcagtaagatcctttcagtcccattccatcttaactgcatctgtctgtgggtcctcagctttccatggctctatagcttctcttcagataaaaggcttcttccatggctggagtgagcaggctaggaaatctgcaggggaggctccccaggaagaactaactgggcctttaataaccttcttttgcaggatcaatatgagcctttagcttggagtcactgggctcaagctttacttttccagtaagagttattcactcaggttttgaaactcagtgtttgaaaaatcaagtaaaattactcaaacacagtgctcatataaaagaaaaaaaatttaaggtgcttaagttttatacctcaataagaaaagcaaaagaatctaaactttctttcagacaataaatactttattatctccattataaatcatgtagtaaacaattagtcatatggggacacctctaggaggtaccaagttttgtcttataaaatttagcatcggccgggcgcagtggatcacacctgtaatctcagcactttgggaggccgaggcgggcagatcacgaggtcaggagttcaagaacagcctggccaacctggtgaaacactgtctctactaaaaatacaaaaattagctgggcgtggtggcatgcacctgtaatcccaggtacgctggaggctgagagaggagaattgcttaaacccggagtcggaggttgcagtgagccaagatcgcaccattgcactccagcctgggcgacagagcaagactctgtctcaggggaaaaaaaaaaaagaattagcattaaactcatacatcaagattacaggatatagaacagagatattcactctcagaaatttaccctgcaataagaggaactgatgtttttatcaatctatgtaactcagcaattatctaccacattttcttgtgaacatgtattcattttctacagccaaaatggaagagaaattttccttattcttttccttgatagctctctaaaagctaatgcttgaaattgtgtttgaaaacactcaggcaaaaaaacacacctgagaaggctgggcacggtgactcacgcctgtaatcccagcactttgggaggccgaggtgggcggatcacctgaggtcaggagttcaagaccagcctggccaacatggcgaaaccccgtgtctactaaaaatacaaaaattagctgggcatggtggtgtgcacctgtaatcccagctactcaggaggctgaggaaggagaatcgcttgaacctggtagtcagaggctgcagtgagctgagaacatgccactgcactccagccttggcaacaaaatgagtgagactccatttcaaaaaataaaaaatgtacctgagaaaatttctaaactcacagtggggaaaaaaaagtaaatgagaatttttaacaatggaatatatgagtaggtattttttgaaacctgtctattttatgtttttgtaaatattttctcacctttcaagctctactaataaaatacaatttacagtttaaaagagtcaatataagtgaacaaatcttttcaaggtgacaaaacaaaggagtggcagtgctgattagaaaacagatgtgtctgactcattcgtcaagtcaggccatccaatccctggagagattttcccaccccatcctgctcacttaagtgtccaatgaccaccttctcaggagacactgcattacgccccaatgagtgccccaagtgcattttacttggcaagttcttgtactagctcactgagatgaggtttttatctgtctttggggatacaattttttttcacaaatcttggagaatccagctggcagaaattatttctgttttcccctcaataccagcgtctgatcgctgaccagcaatatgtctccaagaaatggaaaatggcttggataaaaacaatcttaatgtctcaaagggttagcttttcaaaggaagaatacaccaggagatccctctaagccccagggcattcaccttcttcttgagaggctacactccatacctcagcttgttctataagagaaaatgacccaagagctgatattaactctagcagatagacatggtgggtatcttggtttattcagatagtacaggaccaggaaaaaactaaagggtagctgaggacacatcaccccataaagtttacaaaaaacactgacccccaaagcattatgatctctgtgcttagggaagataaaagaaaaagaggcacagatattttttaaaatacagtgtcaggggattactctttgctttcttctcatggaaaatatttaaaaacagaaaacaaatttttaaaatgttttcaatgtgttgtcagtaaataattaaaatacagtatgaaaaatatacactaaaggacaaatagttcataatgtgaattagggaaagaaagttgacagttccttgaagtaaagtactaaattttcagttctcgagattgtcagaactggaaatttagtatgtatttttacttcaagccagagttaggctggaggtaaggagaactgggggatacacgggagaccctgcttggaacacacgtaaaaaatgcggggaaaatcagtcctctgtggagtgtgaaaatagttaagtgccaggcaattagtctgaggtggaaatctaggccctggattcttgctttgaaaaaaaatctaactcaaatgcattttttttttttttgtaaattactacattagaggaaacaaaattcaggcttaaccgactataaactgtcaattaagctccaattacacaaccaggaaatttgtacgttcaaggtggaaaataagaaactgaggcagggagcactgactcatgcctgtaatcctaccacttagggaggctgaggccggtggatcacctgaggtcaaaaggtcgagaccagcctggccaacatactgaaactctgtctctactaaaaatacaaaaattagccgggcatggtggtgggcgcctgtaattccagctacttgggaggctgaggcaggagaatcacttgaacccgggaggtggaggttgcagatcgtgccactgcactccagcttgggcgtcagtgcaggactccgtctcaaaaaaacaaaacaaacaaacaaacaaaaaaaactaagaagaagaaaagaggagagaaacaaacaaacaaagacaggaagacagaaagaatataactgtacctaaccaattattgaatttgggatttttgcatcatgcaccttatcaaagtccttcaagcccctcttataaaccaaaaactacaacccataggggtgctctaaaatttttgaaccactctttgattaaattatttaatatttttgcagagactgccttttttttttttttttctagacagagtcttcttactctgtcgcccaggctggagtgcagtggcgcgatcttggctcactgcaacctcctcccaggttcaagcgattgtcccgcctcagcctcccgagtggctgggattacaagcatgcgccactatgcccggctttttttttttgagacagagtcaagctctgtcacccaagctggacagcaaatggcgtcagctcgcctcactgcaacctccgcctcccgggttcaagcgatttttctgcgtcagcctcctgagtagctgggattacaggaccgcgccaccacgcccggctaattttttgtatttctagtagaaacgggggtttcaccatgttggtcaggctggtctcgaactcctgacctcgtaatccgcccacctcggcctcccaaagtgctagcattataggcgcaggccactgtgccagactaatttttatatttttagtagagatggggtttcgccatgttggccaggctggtctcgaactcctggcctcgggtgatccgcccgcctcggcctctcgaagtgctgggattacaggcgtgaaccaaagcgcccggcctgccataaatttttaatagggggaaagatgaactggaaacgcagcggactaaagcccttcccattcatgaacccgctccccgagtcaggattctcccctgactaccctcccttggtccctgcacaatctgggagagacgctgcgctgcgggagcagagctgcccagagagggctccaggtcagggcacagtcactgggcggggaagagacaagacgcccgggggccggctgtcagcgaagccgccatcttatggctgaaggggactgaggcccagctgggcaaggagaactcagggcgcagtttgtggagatgactgcggggaggcccgagtccgccacagccacttcccacaggtttcaaccagcccctccctctctctccggatgtcggagccgccactctcaccatttctaggcttccaggggaggccctggcgtcttagctgtggatctcccaatgcttgcaggtcagagggccacagaggctgggcctctaagagcaggggacacaaagcagggaagacgagaccaagcgctccagctgcagcgagagacaaaggccccgccaaatcccggaagccgccctgtccgctccagttgcgtgcctgattggacggtccccagctcagggtccctgattggaaaacgtctaaggcccagccccttcaggccttaagtgacagaagacctgaccaaacgctggactgaatgaagaaagagtgacagcctaagctgcagcgttttcaggcagggcttcctccctgagcttagcccaccccggagggtatttgcatttgacctcgtgtatgaggtttcatgtatttataaataacatactatacggctattcacaaatgaaaaatatataataacaataattttaaaatttcagtttttatgatcttcctggcttctggcatttgagcaagcagcctgagacttttttaaaaaggcaatcctctgaaataaaatataagccacatgtgaattttgaattttctagtagccaactttaaaaagaaacaagaaaaaggtggagttgattgtaacaatttaacttacccaatatatccaaaatattatcagtttaatatgtgagcaataattatatatgtatatacatgtatatgtatgtatatatgtatatatgtgtgtatatatgtatatatgtatgtgtgtatatatgtatatatatgtgtgtgtgtatatatatatacatatatatatatatatatatatatatatatatatatatcactaaatctttgaaactcactctgtattttaccattccagcacatcgcagtttagaccagcgacattccaggcacccaggagccacacgtggccaatagctgccatattgaagtgcagctgcgatgtcagctgagtgaagggcctggacatcagaggtgggggaaagcctcttcctaccaacatctcttcagttcccagggtggaacagatagtggccataaaagagcagaaggcagcaagaataaaataaccacacatagaccactgctggccacctgttgaccaccttccttccagattaaacagtgaacaacaagtgatggggtgacaggagaagtaaactctatgtcttcatatctgtccagtcttttttgagacagactttcactcttattgcccaggctggagtgcagtgaagtgcaatggcaggatcgcggctcaccacaacctccacctcccaggtccaagcaattctcctacctcagcctcccaagtagctgggattacaggcacgtgccaccacacccagctaatcttttgtatttttattagagacagggtttctccatgttggtcaggctggtcttgaactcccgacttccggtgatctgccggctcccacctcccaaagtgctggaattacagacgtgacccaccacgcccggccttttttttttttttttgagacagacttgctctgtcacccaggctggagtgcagtggcacgatcttggctcactgcaacttccacctcttgggttcaagcaattccctgcctcagtctcctgagtagctgacattacaggcgcccaccaccacgccgagctaatttttgtatttttagtagagacagaatttctccatcttggccaggctggtcttgaactaccgacctcatgatccacccgcctcagcctcccaaagtgctgggattacaggcatgagcccagccttgtccacagtcttgacctccaatgtttatatatgaagaaaacagattaaaggcaaacttattttgctatttgaccttggccctaatggtcaggctgtggttatctgttttattttgtggtgtgggggggtctgtgtaagtacaaatcacatgcataaatgtctacgtgtatttctgcattactcagcattatcttacaagacatccaactttctttttatttatttattttgagacagagtctcactctgttacccaggctggagtgcagcagcgcaatgcgaccttggctcactgcaacctccacctcccgggttcaagctattctcctacttctgcctccccagtagctgggattatgggtgcgtgccaccacgcccagctgattttttttgtatttttagtagagacagtgtttcaccatgttaaccaggatggtcttcatctccggacctcgtgatctgcccacctcggcctcccaaagtgagccaccgtgcccggccaagacatccaactttaaatcagaaataaaaaattagaggctgggcacggtggttcaggcctgtaatcccagcactttgggaggcaaggcaggtggatcacgaggtcagaagatcaagaccatcctgactaacacgacgaaaccccgtctctactaaaaatacaaaaaattagctgggcgaggtggtgggcgcctgtagtcccagctactcaggaggctgaagcaggagaatggcgtgaacccaggaggcggagcttgcagtgagccgagatggtgccactgcactccagcctgggcgagactgtgagactccatctcaaaaaaaaaaaaaaaaaaaaagtttgtgacttatgtataatctttaataaggcgactttaaaattattggtaaagtagtatcagcaatgtcttaaatattgttagcattttgttaacttttttgagatgtagtctcactctgccgctcaggctggagtgcagtggcgcgatcttggctcactgcaagctccccctcccgggttcaagcagttctctgcctcagcctcccgagtagctggtattacagacgcctgccaccatgcctggctaatttttgtatttttagtagagacggagtttcaccatcttggccaggctggtcttgaactcccgaccttgggacccacccgcctcggcatcccaaagtgctgggattacaggtgtgagccactgcgtctggaacatttttttaatcaaggggtttttggccaggctcagtggctcatgtctataatcccagcactttgggaggccaaggtgggtggatcacttgaagtcaggagttcgaaaccagactggacaacatgatgaaaccctgtctctactaaaaataccaaaagttggccaggtaccattgtgcatgactgtaatcccagctactcaggaagctgagggaggagaatggctttaacccaggaagcagaggttgcagtgagccgagattgcaccactgtactctaccctcactgacagagtgagattctgtctcaaaaaaaaatcaagtggttttatgattcctccaacaatactataagatttgccctaagggttacaaatgataaagcccagcacatgacagaataacctttgcttgcatatgcttataaaatattgttggcttaatgaaaacagctaaattgtacacttttggtataaacttttttttttttttagaatggtatgaggtcacaggttggtttaagagtgtgccctttcttaaggatgatatgcatggaaaggccaaaagcaatttcaggataccaaaaaaacttcccctaattggcactttaactagtgaggctggggtggaagagcttttcattgacattcccctttatttaacaatttatttagttgaatcaaataaggtactccttttacttttacaaagcccggatggcttctctaccatccaaggaggtaagaagttaaactgagagttttgattgtttttgttttttgagatggaatcttgctctgtcacccaggctggagtgcagttgcttgatctcgccttactgcagcctctgcctcccaggttccagcgattctcttgcttcagcctcctgagtagctgggattacagatgctcacctccacacccagctaatttgtgtatttttagtagggacggggtttcaccattttggctgggctggtcttgaactcctgaccttaggcgatctgcctcccaaagtgctgggattacagggatgagccaccacgcccagccagctgagagttttaatcctctattacacaattggtttctctggcaatcaatcctggtcctgaggctgtccagaagcctccagccagaaatcatctcattaacatacaaaagatgcttctcttttcagacattctaaagattttaggggctgcatacaaagaaactgagacaaactaaatactgacattgataagagcctccagacctggctcagctctggcagtctctggaaagctttgctttactcacctccttttaattagaacctacccccaataaccctgtggacattctttatagcagcggcatgttctggcatttcacatctttgatataatcttggtgtttgttgtttacttccttatacttttgttccggggagctatgtcttgtttacactatattcccagtgccaatcacaggcctcagcccatggcaggtgctcaatgaatagttgtttaatcaatgcacaatggcattgtctgtaaaagggaagcaaggagtaggttagagcacagtttagctcagccacttcctatctggctgactttgggcaagttcctgaattttttcttctttcagtcaccttgtctgtgacacgaggaatcattaaacttacctacagagtttctgctgatgaagatttaatgagcaaaaatatctaaatggctttgaaacactggctggcacagcaagagtgctccacacatcaactgtgtcgactaagggtcaaactctttaaaatatttgaagaaatttattgagtcaaatatgagtgaccatgccccatgacacagccctcagaaggtcctgaggacatgtggcaaaggtgttcttcaaagtgttcattattaaggcatccatctcccataacttcaatgcactttgctaaacaatgcattatttctgaggacatctgaatctgtttctgtaccaatggtcttaatcagaacatcacataaattgccacatctgtgtgagatactcaggaccacggactctcacacactccagaagaaaaggcacggattctgctgctgcccctccaacaccattgtggaaataaaatttcagtaaagggaccaccagtttgacaacctgcttggtgtactccacaaagcagtcaaatcagctatgtgctgcaaaaggtcactttttttttctttgagatggagtctccctgtcacccaggctggagtgcagtggcgcaatctcggctcactgcaatctccgcctacctggttcaagcgattctcctgcctcagcctcgtgggtggctggaactacaggcgcctgccaccacgcccagctaatttttgtgttttaagtaagatgggggtttcaccatgttggccaggctggtctcgaactcctgacctcaggtatccactcgcctcggcctcccaaagtgctatgattacaggtgtgagccaccgagcctggccaaggtcacaattcttcctgtgagcagagaccaggtaacagaagaaaatcacatcacctgtgtgagtggtgcaaagacaatgtcctctggtgccaggacccaggcataaaagttacatcacctggatgttggacccagcaatatgtcacaatggcccaagtaggcagagacagaagagtcagataatgtcagtgcagggcccagcaatgtcacaaagtctcctgcaggcaaaacctaaaagaagagaaaagtgctgggcatagcaatatgctacaatgttcctgtaagcagggaccaggcagaagaagacagtcacatcgcctagatgctgggcctagtgatatgtcaaccatcttttctgtaataaagacccaagcaggagaaacacatcacctggttgctggccacagaaatgtgccacaattttccctgtaagcagggtgctggcaaaagaggagagtcacatctcctaggtaataactgtgacatacctgtgcagaagtatgtcacaatgcccccttcaggaaggggccaggtagagaactcccgtcccttaggtgttgagcccagtgtcacatttgggtatgtcacaatacccaaatatgtggggcctgagaaaaagaggagagtcacatcaccaagatgctaggccaatggtatgtcacaatttccctgtgagcagagaccaggcaggagaagagtaacattaccatggttatgggcattcagttatgtcacaaagccccctgtagtcaaggcccaggaaaatgttacatcacttgggtgttgagcccagcaatatgtaatgatgtctaatgtgacacattgtgctgcaatatggcacaacatgcaggacataggttggagagtcacataacatgggtacaggatccagcaatatttgacaatacccaaaatttgtggtgtccaaaaagaagagtcacatcactgagatgctgggtccagtgacacatcacaatcttcactttgggttgaaccaaggcaggaacatcaaaccactcaggtgtgtaacaaagacatatgtcacaatcacacctgcaggaaggtccagtaattaaaaatcctgcacatgtcccagttctaggtatcagagtatgttgggtctaagtatgctagtgacaatctcaccaactggatctgtgcatgagagctgagagccttcatcccttccatgaactgtttggccctaagcccaggtaggagagtcaacatgtcccccagccaattagggacatgttgactatcctacctaggcttagacaggtagaattctcacctatgaactggatttagaaataagtcattatttcaactctagccagatgttcacatatgacagtcacaattttaactgtagactgtgtgtgtgtgtgagattcagggcctcaccagtgggctctgtccatgtgtgagggtgacaattctaacagttggtggggagtgtatatgagaaacaatctcatctgtatgctgaaccctgtaatgacactctctgtaccacaagagatttatacagtatgcaagaaagtggcaattcttcatgacctttgtacaaggagacccagaatcatattcatgactctaggcctagctgttaagagacagcatcttgggctgggcacagtggttcatgcctgtaaccccagcactttggaaggccgaggtgggcagatcacctgaggttgggagttcgagaccagcctaaccaacatagagaaaccccatctctactaaaaatacaaaattagctgggcgtggtggcacatgcctgtaatctcagctacgtgggaggctgaggcaggagaatcgcttgaacctgggaggcagaggttgtggtgggcagagatcacgccattgcactgcagcctgggtaacaagaacaaaactgtctcaaaaaaaaaaaaaaagaaaaaagagagcgagagcaagagagagcatctctcctattaaatactgtgaggtatgagagtaatcattgcatctgtgatctaggtcaagatatattttacaggccaggcgcagtcactcacacctgtaatcccagcactttgggaggctgaggcaggtgcatcacctgaggtcaagagtttgagatcagcctcaccaacattgggaaaccctatctctaatagaaatacaaaaattagccaggtgtggtggctagctactaaggaggctgaggcaagagaattgcttgaacccaggaagcggaggttgcagtgagccaagatcatgccactgcactccagcctgggtgacaaaatgaaactgtctcaaaaaaaaaaagatatattttacaatcctgcctatgaatagggagagaggagagtcacatcatctgggtttttagccaggaatatgacacaacctttttttttttttttttttttttgagatggagttttgctcttgttgcccaggctggagtgcaatggcacagtcttggctcactgcaacctccgcctcctaagttcaagtgactgctgtgcctcagcctctcaagtagctgggactacaggtgcataccaccacgcctggctaatttttgtaatttttttcccaagatggaatcttgctctgctgcccaggctggagtgcagtggcatgatcttggctcactgcaacctccacctcccgggttcaagcaattctcctgcctcaggctcccgaatagctgagtttacaggtgcccgccaccacacccgattaatttttgtatttttagtagagacggggtttcaccatgttggccatctggtctcaaactcctcaggcgatccacccacctcggtctccctaagtgctggggattactggcatgagccaccgggcccggcttgacacaaccttttctgagggcagagatcagtcaggagtgtgactgcatactcagccaggaataagttacaaccttctcctgaaagcagcacacaggcagcagagtcacatcacctgggtgctgagcccagcaatcagtaacaatgctctctgtggtccaggcccaggcagcagagacacatcacctggtacctgggccagccacaattttttctgtggggcacgtacaggcaaaaatggagcatcacatctcctaggttattgatgcagaggtatgtcacaaggccctctgtagaaagagcccaggtggtagtctcccattttataggtgttggacctagtaatatgtcttaacatgaaaaatattcagggcctaagcaaaaaaggagagtcacataacctgagtgcagggcttaggaatatgtcacaatgcaacatgtgggcagctccaaggctggaaaaaagagtcacatcttggaggttcagagtcaagccatatgtcacaatctcatttgtgtgcttggccaaggcaggagagtcaaatcactaaggtgctttgcaatgcacacaatcacacctgcaggaaagtccagggattagattagaaattccaaacatgtccaggttctaaaggtatgaaagtcaacacctcctgtatgttgggtctaagtacatgagtcgcaatcacaatgattgacagaatgtgtgcaaaagagccacagtttcttctgcagactgtatcttcttagtgtagtcacagccttacatgtgcgctgaaccttggtctggaagtcactaacccacctgtggaccagatccacacatgagaggcaattatccaacttttgacagcctctgtgaaattcagaacttcaacagtgggatgtgtttatgtgggagaatgacaatctttactgttgcctgggtgtgcattcgagagacactctgtgtcacctgaggactttatacaatatgcaagattgataatcctctatgacctttgcacaaggagctccagaatctttcctgtggttctaagcccagatatgagagtcaacatctctctcaccaactgagtccagataggagagtcttcaccttcctatgagctggatttagaaatgagtcaccatcccaactgtagccagatgttcacatatgacagtcacaattccaactgcggactgtgttcacatgtaattcagaacctcactagcagactctgtcaatgggtcagggtgacaactgtaaaggttggtgtagtgtgcataggacaaacacaatctcacttgtgtgctgggccctgttatgacattctctgtaacacactagggcgtaatatatgtgagagagtagtaattctttatgacttttgtacagaaagacttcctcattttcctaagcctgagagcaacattctctctgctattggcttcttcaaggtatgacagtcatcattacatctgtacgcttggccagatatatgtcacaatcctacctgtatgtaaagagcaaattcaagagttacatgaactgtgtgttgggccagggctatgtcacaatcctccctgagggcaggcatcaaacaggagaatcacatcactgggggcttgaccagggatgttacaatccctcctgaaagcagggcacaggtagaagagtgagatcccttgggtgctgggcccagatatgacagacaaaacgactggttgctgggcccaacaatatgtcaaaatcttccctgtgggcagaatgcaggcaaaaatacagagttttatctcctgcatgatggatgcagaaatacatcacaaagctgggtgcagtggctcacaactgtaatcccagcattttgggaggccaaggcaggtggatcacctgatttcaggagtttgagaccagcctgaccaacatggagaaaccccgtctctattaaaaatagaaaattagccgggcatggtggcagatgcctgtaatcccagctactcgggaggttgaggcaggagaactgcttgaacccgggaggcggaggttgcggtgagccaaggttgcgccaccgcatgccagtctgggcaacaataacaaaactccatctcaaagaaaacaaaaaacaaacaaaaaaacatcacaaggcctcctgtgggagggactcaggcaggagccttccaacccctaggtgtttgttccagttgtatatcacaatgtctaaaatatgcaggtctcaggcaaatgaggagagtcatatcacctaggtgctgggtccagtgatctgtcacaatcttttcttttggcaggcctgaagcagaagagtcacgttacctagataatgaataaagagatgtgttatttccgtgggagcatccatgcaggacagtcacatcaccttggtgttggacccagagacatgttgcaacacacaatgtatgcaggtcccaagcagaagaggagagtcatatcacctaggttcttggtccagaaatatttcatgatatttctggaggggagggcctaggcaaagaagtcacattacctaagtgagaggcctaaagatatgtcacaatgcctcctgcgggtagggctcataaacaagaggagagtcacataacgtaggtgctgggctcagctttatgttacaatcatcccagtaggaagggcccaagcatgaaagaaaagtcacatcacataagagctacgtcaagcgatgtatcacaattcccactgtggaccccagaagaggagtcacatcatctaggtgatgggcccaaacatatatcacagtgacttgtgtgtgcaaggaccaagcagaataattacatcactggtgtgcttggtccagtgataagtcactctctattctgtgggcacggcccaggcagtagaggagtgtcaaatcacgtaggtaaaagagggcatttatctgtgcttttcccacaggagagattgcagtgggtcaacagataggtcacaatgcttcctgtgatcagggttcaggcagggaactcacatcatcttggtgctgggcacagcagtatgtctcaatgccttccaagggcacagccaaagcaaataactaacatcaccttagtgttaggcccagcaatatgtcacaatctcctttgttgtcagaacctagaataaagaaaagtcacatcagctaggtgctgggcccaatatgtcccaataccccctgtgagtacagaacagggaggaataaaaagtcacatttcctgggtgattggtgaagacatatattacaatgccctctgtagacaggtccagggtgaagcgttacatcacctgggtgttgcactcagcaatgttacaatggcctatgtgtttagggcacaagcaagagtcacataacatacgcccagcaatatgtcacaatacacctgtgggcagcaccaaggcagaagaggagactcaaatcacctaggtgcaatgcccagcgatgtcacaatgacccctgtgggctgtatcaaggcagaatagaatcacattaccaagggtctggatccagtgatatggcactgtgagctggacccaggaaacaacaaataactcagatgctaggccaaggtatatgtcacaattacacttgtcaaaaggccttgcgatgacattaacaattacacacatgtcctgagtcaagggatgagagtcaacacctcctgcatgttgggtgtaagtacagggtggactggatttgtgcgagagcctcaatttcctttgcaaattgtgtgccttagactgggcacggtggctcacacctgtaatctcagcattttgggaggccgaggtgggcggatcacttgaggtcaggagttcaagaccagcctgaccaacatggtaaagccccatctctactaaaaatacaaaaaattagccaacatggtagtgagcacctgtaatcccagctacttgggagaatcaggcaggagaatcgcttgaacccagtaggcagaggttgcagtgagcggagatcacgccaccgcactccagcctgggttacaagaatgaaacttcatctctaaataaataaagctccttagtgaagttacagtcacaaaggtgtgctgaattttgattaaagagtcacccaaatgtggacaaaatccacacaaatgagagtcaattttccaacattcaactgcctccaaaagtgagattcagaacctcaaaagtagggtgtgtttaagtaaatgacaatctttgctattgactgggtgtgaatgtaagtttgacaatctcacctgtgtgcttggccctgtaagggcactctcttgaggactgtatgagttgcaacctactctgagaactttgcgctgctttggacccatgatcttatgtggtcctaagtctaggtatgggtcaacatctcttcaattggctgggtccagagaggagagtcctcactcacctatgagctgggtttagaaatgagtcaccatctcaactgtggccacgtttacatatgatagttacaattttaactgtggactgcatctgtgcatgagaattatgacctcatcagtggactttcaccatgtgtgacgatgacaattctaaaaattgtcagggagcgcttacatgaaacatgatctaacctgtttgctgggtcctatgatgacatgctctgtatcatctgagtgctttatacaatatatgagagtggtgattcgctataaccttcatgcagagaggagacctgagattttactcctttttctaagcctagctgtgagagacactatctcttctattgactggtatgaagtattagagtcatcatcaaacctgtgagctgggatgagatatatgttaccaatcaacttgttggcagaaagcacccaggagagtcgcatcacctggatgctgggccactgatatgtaaattttttccctgagggctgtgaaaagccaggagagtcacatcatctgggttttcaaccagtgacatgttacaactttctcctgaaagttatgtacattcaggtgagacacaacagctggcggccaggccctgcagtgtcacaatctttcctgtgggcagggtacaggcagaaaaggtatcacatgttttatgtaatggatgcagatatatgtccagatatatgtggacagggctgaggcaggagcctcccattttttaggtgtttggcccagtgaaatgtcacaatacccaaaataagtggttgctagacagaagagtctcatcacctaagttctggtttaagtgatatgtcacaatctttctttttgacagggttcagggaggaaaggagtcatatcactgagatgaacaaaaataaatgtcctaataaccccatgctcaaggtccatgtgagagagttgaatcacccatgtgttgaacccagtgacatgtcaaaatatacaatttatgcagggcccaggcaggagaagacagtaccttcacctaggtgtcaggcccagtgatacatcacaataccttctgtgacagagtccaagcagtggagaagagtcacattacctaggtgctgagtcaaaaaatatgtcacaaaaatcactgaagggagggcccaggcaggagtcaaactacgtaaattaggggctcagagatatgttgcaatgacctctgtgggttggactcaggagaaacaggagagacacataacctaggagctgagtacagctatatgacataatcacccaatttgataagcccaggcaaaagaagagagtcatatcacataagtgctgggccaagtgatgtgtcacaatcctcattatggacagttcccagaaagaaaaggagagttacatcatctaggtgatgggtctagatatgtcacaataagccatgtgggctgggatcatgcagaagaatcgaatcacttgtgtgttaagcctagtgataagtcactcttttctgtgggcatggaccaggcagggtaggacagtcataatatctaggtgctgggcccagagataggtcacaatctctactattagcaaagcccacgtaagaaaagagtcgccgggcacagtggctgatgcctgtaatcccagcactttgggaggccgaggcaggcagatcacctgaggtcagaagtttgagaccagcctgaccaacatggaggaatccttctctactaaaaatacaaaaaattagctgggcatggtggcaggcacctgtaatcccagctacttgggaggctgaagcaagagaattgattgaacccgggaggcggaggttgtggtgagccaagatcatgccactgcactgcagcccaggcgacagtgcaagactctgtctcaattaaaaaaaaacaaacaaaacaaaaaaccccaaaaaaacacaaaggaaaaaaaaacaacaaagctctactgtgtactaaatatttcacaaaatattttttctttttttttttttttgtttttttttgagatggagttttactcgttgcccaggctggagtgcaatagtgtgatctcggctcactacaacctctgcctctcaggttcaagcgattctcctgactcagcctcccgagtagctgggactagaggcacccaccaccatgcccagctaatttttatatttttagtagagacagggtttcacaatgttggccaggctggtcttgaactcctgaccttgtgatccacccacctcagcctcccaaagtgctgggattacaggcatgagccactgcatctggcccagaaaattttcataaacaggggcaaatattattacttctcataaattattgttgtattgtgcattaatatataaaaaattgctaggataaaatttagtagtcaatatagcccaagaaagattgttgccaggcatggtggctcatgcctgtaatctcagcaatttgggactccaaatgatcccaaaggatcacttaaagtgaggagttccagaccagcctggccaacatggtgaaacgtctctatttaaaaaaaaaaaaaaaaaaaaaaaaaaaaaaaaaaaaaatcagccaggcgcagtggctcacgcctataataccagcactttgggaggccgaggcgggtggatcacaaggtcaggagatcgagaccatcctggctaacaaggtgaaaccccgtctctactaaaaatacaaaaaattagccgggcgtggtggcgcctgtagtcccagctactcaggaggctgaggcaggagaatggcatgaacctgggaggcagagcttgcagtgagccgagatggtgccaccgcactgcagcctgggcgacagagcgagactccgtctcaaaaaaacaaaaacagaaacaaaaacaaacagaaaaaacattagccaggctttgtggcgcgtacctgtaatcccagctactcaaaatgctgaggcagaagaatcactaaaacctgggagacagcagttgcagtgagccaagatcgcgccactgcaccccatcttgggtgacagaagatgactgtctcaaaaaaaaaaaaaaaaaattgttgccattcttgctataatgctataaacctgtaaattctataaaactctcaatttcatattctccatgaattcttacaggcacacacctgtaatcccagctacttgaaaagctgagacagaagtattgcttgaaccctgaagacagaggtttgcagtgagccgaaattgtgccactgcactccagcgtggggaataggcaagactctttcccaaaaaaaaaaaaaaaaaaaaaaaaacacagaaacataagcccaaccccggatctcttgaatgagaatctgcatctcaagatgatctccagtttattgttgcacatgatacaatttgcaaagtgtgcttctaaatcactgacttttctacctgataattatacacagctgattctggatgatttaaaatagcactcaggccaggtgcggtggctcacacctgtaatcccagcactttgggaggccgtggtgggcagatcacaaggtcaagagatcaagaccatcccggccaacatggtgaaaccctgtctctactaaaaatacaaaaattagctgggtgtggtggcctgcgcctgtagtcccagctacctgggaggctgaggcaggagaatggcttgaacccgggaggctatgttgcagtgagccgagatcacgccactgcactccagcctggtgacagagcgagactctgtctcaaaaaaaaaacgtaaaaataaatttaaaaatataaaaaattagccaggtgtgctgttgcacatgtaatcccagatactcgggaggctgaggtaagagaattgcctgaacctgggaggtggaggctgcagtgagctgagactgtgccactgcactccagcctaggcaacagggcaaagacctcgtctcaaacaaaccaacaaaccaacaaacaaaccaggctgacttctgcgtaaaatattccctgatctagcatctactttcaccatgttctatccctccccttcccactttttttctgactttgttttctcttccttatgaaagaaagtccttttctctctaacctttaaaattctccaacatcttataattggtgctttccccttgttgcaatactcctttaaaattaagtaacttcattagctgggcatgatggcgggtgcctgtaatcccagctacttgggagactgaggcaggagaattgcttgaacccgggaggcggaggttgcaatgagccaagatcaccccattggactcgagcctagggaactgagcgaaatgccatctcaaaaaaaaaaaaacaaaaaattaagtaacttcttaccaagcacagtggctcacacctgtaatttcagcactttgggaggctgaggtgggtggatcacctgaggtccagagtttgagaacagcctgaccaacatggtgaaaccccatctctactaaaaatacaaaaattagccaggcatcagggcgcctgtttgtagtcctagctactagggaggctgtggcaagaagatcgcttgaatctaggagacagaggttgcagtgagccgagattgcaccactgtactacatcctgggtgagagaatgagactcaaaaaattaagtaacttcttacctaaatctaaatttgtcatattttacaaaatctagaaacaacctcagaataataacaactctattcccagaaagagcttcccaaccccacttttgtgccaatcccaactgcatctgcctgtggatttcgaggttttcagggctccgtggcttctctaagtataaatgctctgtccatggctattgtgagcaggccagaacatctgcaggggaggctcctcaggcagaactggctgctccttcaatgatctcactttacaggcaaagctgtccttagcttgcagtcactgagttcaggcttctacttaccagtcagggttactcacttagttttaaataagaaaatgaccaatgtaaggccaggtgcggtggttcaatgcctgtaatcccagcactttgggaggctgaggcaggaggatcacttaaggtcaggagttcgagaccatcctgaccaatttggtgaaccccatctctactagaaatacaaaaattagccgggcgtagtggcatgcacctgtaatcccagctatccataaggctgaggcatgagaatcccttgaacccgggaggcgcaggttgcaataagccaagatcgcaccactgcactccagcctgggcgatagagcaagactcagtctcaaaaaaaaaacaacaaaaaaagtcaaaaaacgaaaatgaccaacgtttcaagaaaagagtaaaatcactccaacacattgtttatagaatattgtaaggaaattgtaagacttaaattttctactacaatataaaaagcttaagtaggtttgggcacagtggctcacacctgtaatcccagcaatttgggaggctgaggtgggtggatcacctaaggtcaggagttcaagaccagcctggccaacatggtgaaacccgtctctactaaaaatacaaaaattagctgggcgtggtggtgcttgcctatagtcccagctacttgggaggctgaggcaggaggatcgcttgaacccgggaggtggaggttgtagtgagccgagatcatgccactgcactcaagcctgggtaacacagtgaggctccatctcaaaaaaaaaaaaaaaaagaaaagcataagtatctgtccttttcagacaataacatgttatttaaatatttccctgatagacaatttaataaacaactatatgtgaacatttctagaaggtgtcaagttccatctcataaaatttagcattaaacttggacattcagacaacagaatacagaacagagatacccatcgttacaaattctagaccctgcaaaaaagaggagttgatggtttgagaaatatatacaatgcaccaattaatctatcacatttgcttgtagaaatgtattcactttctatagctttaatggaaaaaagatttttccatttctcttctctgacagcattccccaaagcaaagccctggggttctatttaaaatcttgcaaccggccgggcacagtggctcatgcctgtaatcccaacactttgggaggctgaggcgggtggatcacgaggtcaggagatcaagaccatcctggccaacatggtgagaccccgtctctactaaaaatacaaaaaattagccgggcatggtggcgggcgcctgtagtcccagctgctcgggaggctgaggcaggagaatggcatgaacccgggaggcagagcttgcagtgaaccgagattgcaccactacactccagcctgggtgacagagcgagactccatctcaaaaaaaaaaaaaaaaaaaaaatcatgcaaccagaaaaaacagacatgagaaacttactacattcactctggggaagataaaggtaaataagaatctgtaacaaataacatatatgactagatttttctgaaatatacctttcaaagtctttgactttttaaacatcatttaagctcttttgatgaaatgtaacttacagttattaaaaaactgaaatcaaaataagtgaaaaaatctttccaaggtgacaaactcaggaagtggcagtgctgattggaacacaaacatgtctgactccactgtcaagtcagaccataatatcactcaaaacattctcccatccccaccctgcccattaaattagtgaccaccttcccaggagacactgtactgtaccccactgtaagcctcaggtgcattttgcttcaggttcttgcattgccttactgggatgggagcttcttgtcctttggaaaaaattttatttcaagaatcaacagaaatcatttctgctttttctcatcaataacaacatctgattggctcaccaccaacgtgtctactaagaataaaaattaggttgataggttgagaggccgggcgtggtggctcacacctgtaatccctgcactttgggaagtgggtggatcgcctgaggtcaggagttcgagaccagcctggccaacatgatgaaaccccatctctactaaaaatacaaaaaattagccgggtgtggtggcaggtgcttgtaatcccagctactcaggaggctgaggtaggagaatcacttgaacctgggaggcggaggttgtagtaagccgagattgggataatgcactccagcctgggcaacaagagtgaaactccatctaaaaaaaaaaaaaaaaaaaataggttgagaagaaactttttaactgtttacacacttgttcatttttatgtcatcagggaagacccctcaatatatttcagagtcaacgggtaacattttatttttaataattttttttgagacagagtctcgctctgtcacccaggctggagtgcagtggcatgatctcagctcactgcaacctccgcctcccaggttcaagcgattctcctgcctcagcctcccgggtagctggaactacaggtgcccgccaccacgcccagcgaatttttgtatttttagtagacacagggtttcaccatattggctaggctgctcttaaactcctgactttgtgatccgtccacctccaacctcccaaagtgctgggattacaggcatgagccaccacgcccaggcttttttttgttttgttttattttttgagatggagtcttgttctattgcccaggcaggagtgcagtggtgatcttggctcactgcaacctctgcctcccgggttcaagcaattctcctgcctcagcctcctgagtatctgggattacaggcacatgccacaacgcccagctaattttttgtatttttagtagagacagggtttcaccatgttggccaggctggaaataattttttactctgggactgggtgcagtggctcatgcctgtaatcccagctacttgggaagctgaggtgggagcatcacttgaatctgggaggctgaggttgcagtgagccgagatcgcaccactgcactccagcctgggcaacagagcgggattctgtctcaaaaaaaaaaaaaaaggtatactctgcaccagcagcattaacacaaaaagttctattaaaccctgacacccactcaaatgtcacctcctttataaagctctgattttccctctatgtcagtggcacaattgatcactattaccattcagctcaataccttatgtctttttatgtgcaagtattattctccagaataaattaatcatttacacatctatccatgctaatgaactataaactcctacagggcaggtatgttgaaccctgttcatctgtgtaatcaaaatgtcttatacataataggtatcatatacaagcaaaatccctgtcagggaattattggaaaagctaccaaattcttttaagttcaagggtacatgtgcaaattttttacatagataaatgtgtgtcatggcgattttttgtgcagattatttcaccacccaagtattaagcctactacccattagttatttttcctgatcctctcccacgtccgataggccccagtatgtgttgttcccctctatgggtccatgtgttcccatcacttaactcccacttgtaagtgagaacatgcggtagttttctattcctgtgttagtttcctaagaataatggcttacagctctgtccacgttcctgcaaaagatatgatctcattttttgtatgggtgcacagtggcatggtgtatatgtacaacattttctttatccagtctatcactgataggcatttaggttgattccatgtctttgctattgtgaattgtgctgcagtgcacatacgcatgcatgagtctttataatagaatgattcacattgctttgggtaaatacccaataatggattgctgggtcaaatggtatttctgtctttaggtctttgaggagttgtcacactgtcttccataatggttgaactaatttacactcccaccaacagttcataagggttcctttgtgaaaaaataattttaattttctaagaggttagctttttagacaaatagtatacaagaaaattttccacaggcctaggccatccagctgctcttctgagaggctacactcttactcctcaggctgttctccaagagatgacccaggggatgatattcattagacactccaagagatatggccactgtgggtatcttggattatcccagaccattctgaaactcatgaccaaaaaaagactggagggctgctgtaaagggctctgtaatttctccaaagcaaagcttcaacccaaagatttactaaggtgtgtgtgcctagaaaagataaaaggaagagaggcacagatttttttttttcccagtggaatttcagaggattattttctacttttttctcacgtaaaatgtttacagacttgggaggctgaggcgggtggatcacctgaggtcaggagttcgagacctgcctggcaaacaagacaaaagcctgtctctactaaaaatacaaaaattagccagtcatggtggcagaagcctgtaatcccacctacttgggaggctgaggcaggagaatcccttgaacctgggaggtggaggttgtagtgagctgagatcacgccattgcactccagcctgggcaacgagagtgaaactgcctcaaaaaaaaaaaaaaatgtttacagacagaaaacaaatctttaaaaacctgccattcactgctgtgtaaaaacatgattaacaattaaaacactgtgtttgaaatgtacaataaaggacaaatagttgatagtgttgtaaattggagagaggaagctgtcctcatttcctacatttgagaatgtaggaatgaaagcggacatttataattttactgcaagcctgagttaagctaggagaaaaggtggatttgaagtcctgcttgccatacattaggaagtcacagaggtaaaccagtcctgtggagtgttgagataactaaaaagcaggaaattagactgaagtggctctagtgccctgtgttcataagtaaaaaatgaaaaacctaactcaaattcacttcttataaattactattttaggcagaaacaaaattcaggcttaaccaatcataaacctgcaattaacctctgattacataaccaggaaatttccacctgaatcatacaaataaggtgactacataactgtaaccaattctccaatttggtttgccttctcacacgccctttataaaaccctttcctttatgtctctcaggtgggccacatattatggctgggtgttttccatttcaccaatcactgctcaaataaactcgttaacgttttaacattgactccctttaatatttaatagaagcggctgggcgcggtggctcatgcttgtaatcttagcactttgggaggccatggcgggcgtatcacttgaggccaggagttccagaccaccttccaccatggtgaaaccacttctctactagaaatacaaaaatttgccaggcgtagtggcgcaggtctgtaatcccagcttctcgggggccgggggggggggcgctgaggcacgggaatcgcttgagcctgagaggcagaggttgcagtgatcacgccactgcactccagcctgggcaacaaagcaagactccgtctcaaacaaacaaacatgtttaacaagagactgggagtctcacctgccacagctccttctacgcacacacgagtcggaattctgccctaatgacccgcctggcatccctgaacaatccgggaaatactcggcgctgcgtgcagagctgcccagggagctccagacacggcgccgcagggtccgggcgggacgccggggtcccggctgcgggcccagccgccatcttacggcgagaggggtctggggcggagctccgccagcggagactcaggttggcgacccgggagcggactgtggggaggccggtcccgccggtttcacagctcgctctcccctctcgggatgcccagccccgcacactcaccttttcccagcttccaggatgtcctggcatcttagctgtgcgtctcccagaacctgcagatcacagggcaagaggctgtgacagtcaccgggggctcccgaggtggaggacgtaaaacagcagagaccgatcccaagctgtggcgggagtgagatacaaaggccccaccaaatgccggaagccacgccctcctctccaactgggcggttcctgcgctagcgccactgattggataaagcaccagcactctctctccataccaaccccctcctctcagcattagtgcattttactgacaggaaaacaggctaaagtaggtagggtaaggtgcacagggaattacagctaataaagaagtgagctgagacttgaaatgcacttgctctttcccttacctgggtttgcttgtataatgcatcttatttactacttaagggtaagaaaaaaacatttggacttttttttttttttgtacctagtttcgctcttattgcccaggctggagtgcaatggtgcaatcttggctcactgcaacctccgcctcccgggttcaagcgattctcctgcctcagccttccgagtaactgggattacaggcgcatgccaccacgcccggctactttttgcatttttagtagagacagggttttgccgtgttggccaggctgatctcgaactcctgacctcaggtgatttgcccccctcagcctcccaaagtgctgagattacaggcgtgagccaccgttcccggcccatttggactttttttttgagacggagtatcgctctgtctcccaggctggagtgcagtggcacgatctcggctcactgcaagctccgcctcccgggttcaggccattcccctgcctcagccttccaagtacctgggactacaggcgcccgccaccacgcttggctaattttttttttttttttttttttttttttttttttttttttttttttttttttgtatttttagtagagacagggtttcactgtgttagccaggatgatctcgatctcttgacctcgtgatccgcccgcctcggcctctcaaagtgctgggattacaggcgtgagccaccgcgcccagccccatttggacattttaaaacaactttttaatcattttgataatgcagaaaaaacccagcactttgggaggctgaggcgggcggatcacgaggtcaggagatccagaccattctggccaacatggtgaaaccccatctctattaaaaacacaaaaattagctgggtgtggtggtgtgcgcctgtaatcccagctactggggaggctgaggcaggagaatcacttgaaccagggagtcagaggttgcagtgagctgagatcgtgccattgcactccagcctggctatagggcgagactgcgtctcaaaaaaaagaaaagaaaagaaaagaaaacaaaacaaaaatcctgagatggtgctgctggatatgagtgctggaaagggggagggaattaagagctgaccagatccctcctgactgccccgcagaacaagtggggggtggtgctgcactaaatgatgccctcccacagaagatgtatttgcattggttcaatgaatatacaatgcagagacctaaatgaagacacgtgaatgggtgtatgtggacatcagattgcagctgggaaacaggtgcctctcattctccccagcaagtgtggaaggtgtccatgcccatgagggtatagatctgtcattcttaacttgtatacaactctaggtcagttctgactcaatgacgtgcagatgagatttctcagatcatttgtatgtttgacattgtggctgctgcttttgctgccaccatccccaggcccaacctggcttaaagtccaggctttaggtcaaaacaatggagggcttcctgtgttctgggatgggaagttggagatctgtggtagggctgggggttggggtacactttagttttgtgcagaatgagagctgcagtggttttattaatcgtgatgattggcctggcctggttgtaactctgggcggggggaaggaatcagcattggttgttccccagatattcatgtgtccagccctggccttcctgccctcagacccagcaaaaagtaccaccacagactctgacttgcctgcctactccctgcaccccagatgggaataccttggaggccagactctgaatgtattattctccccattctaaccagacctgcctaacacacagtgagggagtgaagataggcagggtgagggacctggggagaaccagagtggaatcacaaatccttgggaaaagttaaagatacagcagtgggctgggctcagtggctcacgcctgtaatcccggcactttgggaggccgaggcaggcagatcacctgaggtcaggagttcaagaccagcctgggcaacatggtgaaacccggtctctactaaaaatacaaaaattagccgggcatggtggcgcacacctatcgtcccagctactcaagtggctgaggcaggagaattgcttgaacccggaaggcagaggttgcagtgagccgagatcatgccactgggtgacagagcgaaactctgtctcaaaaagaaaaaaaaaattgttctatctctcaaaattgagaagatgaccaatagggagaaattgttaaattaattataccctaaagctgctccctttcctgtttaattttagtcaatagttgttttttgttttacatagtaaactgaaaactaactggacatgtaaatagactgtacccattcttgtaccaaccactgtggtttggccaataaaaggatgtcaactgttcaaaccatgttcaaataaggcaaaccccaagctgtaatcaatctggctgtttctgtacctcactgccattttctgtatgtcattttgctttttctatccataagtctttttccaccttgtggctgtgcttgaagggggcctgcccctccacacctgtgggtatttctcgaaaggtggaaatgagagactgagaaaaaaaaataagacacagagacaaagtatagaggaagaaaagtgggcccgggggaccagcgctcagcatatggaggacctgcaccggcaccagtctctgagttccctcagtatttattgatcactgtctctaccatctcggtgaaggggatgtggcaggactatagggtaatggtggggagagggtcagcaggaaaacatgtgagcaaaggactctgtgtcataaataagtttaaggaaaggtgctgtgccttgatgtgcacataggccagatttatgtttgactttacacaaacatctcagtgcagtaaagagcaatattgccactagcatgtctcacctccagccttatggcgtttttctcctattgttgtaaccgagcgagttatagagaaatgccacactctgagactaattcaggagtcctttattgccagcaactgagagacggctagcgctcaaaattctctcaaccccgaagaaggggctagatttctttttataccttggtctaaaaggggagggggagtctagctgaagcaatttttacagaagcaaaacaggcaaaaagttaaaaaattgatggttacagagatagttacagaaaaataaacagttccaggtgcaggggcttaaactatcacaaagagataatgcaggggctttgggtaccatccaccgagcgcatccccaggagctgctggttcagcttgcctctatatcttatcagtaagtgcattcctggacgtgcttggagtcagcttgcactagttatgtccttaagggagggggataaggggggctgcaagtgaagaaacaaaaatggagtctgtctggctctctcagctaaaagagagtcaatccggttaaaacaaggtagggtatcacactatcttagtaaatagaatgtacgattgggttttacaccgagacattcgaatcctagggacgagcaggagacagatgccttcctcttatctcaactgcaaagaggccttcctctctcactaatcctcctaagcacagaccgtttacaggtgttgggctaggggacggtcaggtctttcccttcccatgaggccatatctcaggctgtctcagttgggggaaaccttggacaatgcacaggctttcttaggaagaggtccctgtggccttctgcagtgcattgtgtccctgggtactcgagactggagaatggtgatgacttttaccaagcatactgcctgcaaacatatttttaacaaagcacatcctgcacagccctaaatccattaaaccttgagtcaatacagcacatgtttctgcaagcacagggttggggctagggttacagattaacagcatctcaaggcagaagaatttttcttagtacagatcaaaatggagtttttatgtcttcctttttctacatagacacaataacaatctgatctatctttctttcccccacaatgctgaaatctctctgagcctactctggcttcacaggctactcgatttgcaaatcactctttgttcaattaaactctgttgaatttaatttctccaaagtttttgttttattttaaacattttcctcaaattttttctatcattaaaatgaataatgtgctcttgggctttgattttctaaattcatccctcagctattttcccaaattattttgtcctttcataatgcttctgcaattttttttttttttttttttttttgagacagtctcactctgtcgcccaggctggactgcagtggtgcaatcttggctcactgcaacctccacctcccaggttcaagccattctcctgcctcagccttctgagtagctgggactacaggcacgtgccaccatgcccggctaatgttttgtatttttattaaagatggggtttcaccgtgttagccaggatggtctccatctcctgacctggtgatttgcccgccttggcccaagagtgctggcgtgagccaccgcacctggctacatctgttttctaatcagtactgccactccctgggtttgtcaccttgaaaagatttgttcacttatattaacatcagttttttaactgtaaattgcattttattagtagagtttgaaaggtaaagtatttacaaggacataaaggcggtgagtttcagaaaaatctaataatatatttctttggttaaaaattctcatttacctatttctttctttctttcttttttttttttgagacaaagtctcactctgtcacccaggctggagtgcagtggcgtgatctcggctcatggctgcctccgcctcccgagttcaagcaattctcctgcctcagcctctgcagtagctgggattacaggcacctgccaccatgcccggctaatttttgtttttgtttttgtttttgtttttttttagtagagatgggtttcaccatgttggccaggctggtctcgaactcctgacttcaggtgatccccccacttcggcctcccaaagtgctgggattacaggcatgagccaccacacctggcctactttttttctttctttctttttttttttttttttttgagacaaaggctcactctgtcgcccaggctggagtgcagtggggcaatctcggttcactgtaatctctacctcccaggttcaagcgattctcctgcctcagccccctgagtagctgggattgctggtgcacatcaccacgcctgggtaatttttgtatttttagtagagatgggctttcaccatgttggccaggctggtcttgaactcctgacctcagtgatctgcccacctcggcctcccaaagtgctgggattacaggtgtgagccatggcacccggccttgcctggataattttttaatttttaatagagacggggttttgccatgtgggtcaggctgatcccagactcctgacctcaggtaatccatttgcctcaatctcccagagtgctgggattacaggcatgagccatggtgcccagactaaaaattctcatttttgctttccctgggtgaatttagaaattttctcagatgtgttttttttatggctgggtgatttccaacagaattccaaggcatagctattagaatgctagctaccaaggataaaataagggaaatctctcttctattttggctgcagaaaataaatacatttccacaagaaaatgtggtaggtaattagtgagtcacatagattcattaaaacatcagtttctctttttacaaggtaaattcgtgacagtgaatatttttgttgtatatcctgtgatttttatttctgagcttcatgctaaattttatgagataaaacttgaggccaggcacagtggcttacgcctgcaatcctagcactttgggagtccgaggccggcagatcgcctgagctcaggagttcgagaccagcctgggcaacatggtgaaaccccgtctctactaaagtataaaagaattaggcgggtgtggcatcatgtgcctgtagtcgcatctactggggaggctgaggcaggagaattgcttgaacctgggaggcggaagttgcagtgagctgagattgcaccactacactccagcctgggtgacagagcgagactccgtctccaaaaaacaaacaaacaaacaaaaacttggtacctcctagaaatgttcacatatgactaattgtttactacatgatttttcatgaaaataatgcaataatacatttattatctgaagggaatagatgcttttgctttccttgttgaggtatgaaatataagcaccttaaaatttcctttcggtggggcatggtggctcacgcctgtaatcccagcactttgggaggccgaggcgggcggatcacgaggacaggagattgagatcatcctggctaacatggtgaaaccctgtaataaaaatacaaaaaatattagccgggtgtggtggcacgtgcctgtagtctcagctactcaggaggctgaggcaggagaatcacttgaacccgggaggcagaggttgcagtaagccaagatcgtgccactgcactccagcctgggtgacagagcatgactccatctcaaaaaaaaaaaaaaaaaaattcctttttttacatgaaaatagtgtttgagtaattttgctagatttttcaaagattttcaaaaaccaagtgagtggctgggcatggtggctcatgcctgtaatctcagcactttgagaggctgaggcaggcggatcacctgaggtcaggagttcaagatcagcctggccaacatggtgaaaccccgtccctactaaaaatacaaaacagccaggcatggtggaaggtacctgtaatcccagctactcgggaggctgaggcgggagaattgtttgaacccaggaagcggtggtagcagtggctgagattgtgccactgcactccagcctgagcaaaagagtgagactccatctcaaaaaaaaaaaaaaaaaaaaccctctctctctctttgattgtcacacccaggctggagtgtgacaaaaacaaaactaataggtcaaattcagcatgcaggaagaagcacaggaaaatagagagagaaaagaaaaaagaagaaaaacaacaccaagttactctaagtactgtggaaataaactgaaagtggggttagagaaaaaaagaaagaagaaggtccaagtagttccaggtacttgggaggctgagatgggaagaccaactggacgtgaccagtgaatcacagtctgcatggacctgaatggtacaggcgccagtgagagccatctggtcgaccttagacatggcaagctgacagccaggtccaaagctcatggccaacatctctctcaaaataaataaacaaaaaaccaacagtaaattttaacaataacaaagaaataataacaagcaataagaccaataaataagtagaagtaaacaaacgtaaaaggtaattaatatcacaattagttgttctctctctgtttctcagtttctgtctttctgtttctctgtctctctctcccttgatctctgtgtgtcacactatcacacccaggctagagtgcaggtgtatggttacagctcactgttgattgcacacctgcactcaagccatgatgtgacagagtgagaagacctagctaaatagaaatatatataacatcaacttcagcatctaggaaggagcataaaagattttaaaaagagagagagagaacaaaggacacaaaagaaaaactacggcaactctctctaagtactgttgaagccaactgaaagtggggctagaaaaaaaacagaggaagaaggtttgagtagttttacatacttaggaggctgaatggaaagaccaccagggtgagactggggagatcaaggctatagggaatcacaatcacatccttcctttggacctgaaaagtactgccactggttatagctatctggtccacctgagacatggcaagctggcggccaagtccaatgctcatggctgaagtctgtctcaaaataaataaactaacaacagtaaatattcaacaataaagaaataataaaaaacaataataagacaaataagtgggagggaacaaagataaaaggtaattaatatcacaattaattgtctctctttctgtctctctctcccttgatctccatgtgtcacagtttcacacccaggctggagtgcacatgtgtggtcacagctcattgctgatcactcacctgcactccagccagggcgtgacagagtgagaagacccagctaaaaaaaaaaaaaagaaatctaaaacatcagtttcagcgtgcagaaaggagtgtaaggaaatgaaacaaagagagcaaagaacaaaggagaaaaaccacagcaactccctctaagttctgtggaagcaaactgaaagtggagttggaaaaagaacagaggaagatccaagcagtttcaggtacttaggaggccgagatggatgggaagaccacctgggcaagaccagggagatcaatgccacaatgaatcacagttgcatctctttccagccatgctcagtggctcacgcttgtaatcctggtactttgggaggccgaggcgggtggatcacgagatcaggagatcaagaccagcctgaccaacatggtgaaaccccatctctactaaaaataaaaaaaaaattagctgggcgtggtggcgggtgcctgtaatctcagctacttgggaggctgaagcaggagaatcatttgaaactggaagggggaggttgcagtgagccgagattgcgccactgcactctagcctgggcaacaagagcaaaactccatctaaaaaaaaaaaaaattgcatccctctgccttacctgagtaatatgagcaatactgctgccggtgagagctatctggctgaccttagacaaggcaagctggcggccaggtccaatgctcgcagctgacaactgcctcaaaattaataaacaaatgaccaacagtaaataataataacagagaaatgataatgaacaataatatgaccaatcaataaataaataaatgggagtgaacaaaggtaaaaggtaattaatatcacaatttattgttgtctctctctgtctctatttctctgtctgtttctgtctgtctgtgtctctgtctgtctttctgtctctctctttgatctctgtatgtcacactgtcaaacccaggctgaggtgaaggtgtgcagtcacagctcactgctggtcatgcacctgcactccagccagggtgtgacagagtgagaagacctagctaaaaaattatatatgtgtataaaacatcaacttctgcatgcaggaaagagcgtaaaaaaaattaaaaaaaaaagagagacagcaaagaacaaaaagaaaaactacagcaactctctcaaagtactgtggaagcaaactgaaagtggggttagaaataaagcagaggaagaaggtctgagtagtcccaggtactcgggaggccaagatgggaagatcagccccgtgagactggggagatgcaggctgcagtgaatcatgatcgcatccctctgctggacctgaatggtactgctgccagcaagagccaaatggtcgaccttagacatggcaagctggcgaccaagtccaacactcgtggctgacatctgtcataaaatgtataaacaagaaaaccaacaatatatatattttttgagacagagtcttgccctcattgcccaggctggagtgcaatagtgcaattttgtctttccgcaacctctgcctcctgggttcaagcgattctcctgtctcagcctcccaagtagctgggattacaggcatgcgccaccacgcctggctaattttgtagttttagtagagatggggtttctccatgttggtctggctggtctcgaactcccgacctcagttcatccacctgcctcggcctcccaaagtgctgagattacaggcatgagccacctcgctcagcccataaatatttaaaaataacaaagaaataacaataacaagaccaataaataagtaagtgggagtgaacaaaggtaaaatggaattaatatcacaactaattgttgtctttctgtctgtctctgttttggtctctctgccactgtctgtgtctctgtctctctgtctatccctctctccatcaatctctgtgtgtcacactgtcacacacaggctggagggcaaggtcacggtaatgactcactgctgattgaacacctacactccagccagggtgtgacagagttagaagacctacaaaaaataaaattaaattaaacatccatgtcagtgtggaggaaagaaggtagcaaaaaataaaagaaaaaaagaaacagagcaaagaacaaagaataaaggccacagcaactccccctaaatactgtggaagcaaaatgaaagtgggggtagaaaaaaaaaagtaggaagatggactgtgtagtcccaggtaaatgggaggctgagatgggaaaaccttccggatgagaccacgaagatcgttgctgcattgaatcatgattgtatccctctgctgggcctgaacaatagtgctgccaatgagagccatgtggtcaaccttgacaccagcaagagccatcagtttgaccttagacatggtgagctggcgactaagtccaacactcgcagccgacatatgtcacaaaataaatatacaaaaaaaaacaacagtaaatatttaacaataactaagaaataataacaaacaatattaaagactgttgggaacaggctcccaaatctggccataaacaggccccaaaactggccataaacaaaatctctgcagcactgtgacatgcttgtgatggctatgatgcccatgctgaaggtttttggtttaccagaatgagggcaaggaacacctggccaacccagggtggaaagccgcttaaggcattcctaaaccatgaacaatagcatgagcaatctgtgccttaaggacatgttcctgcagcagataactagccagagcccatccctttgtttcccataaggaatgcttttagttaatctataatctatagaaacaatgcttatcactggcttgctgtcaataaatatgtgggtagcactctgtttgtggcggtcagctctgaaggctatcagccccctgattcccactctgcactctgtatctgtgtctgtgtctttaattcctctagcgccactgggttagggtctccacgactgagctggtctcggtaaaagaccaataaataaatgagagtgaacaagggtaaaaaataattaatatcacaattaagatattcttctctctctctctctgattatcacactcaagctggagtgtgacaaaaataaaaaaaatctaagaggtcaacttcagcatgcagaaaggaacatagaaaaatagagaaaacaacaaagatttaaaacaacagcaagtcactctaactactgtggaacaaactgaaagtggggttagaacaaaaacagaggaagtaggtcctagtagttgcagggactctagaggctgagatggaaagatcacccatgtgagaacaagactgaggctacagagagtcataatcacatcactctgctggacctgaaacagtatggccaccagcgagaaccatctggtcaaccttagacatggcaagctggcagctaagcccaatgctcatggctgatatccatcagaaaatatataagcaaaaaaaccaacagtaaatatttaacaatatcaaagaaataataacaaacaatactaaacaccagtaaatcaataagcaggagtcaacaaagataaaaagtaattaatattacaagtaagatcttcttcactctctctctctctctctcttcatttgtcacacccagctggagtgtgacaaaaaaatctaaaaggtaaacttaagcatgtagaaaggtatgtagaatagagagagaaagaaaacaagtaaaataacagcaagtcattctaagtactctggaaacaaactgaaagtggggttagaaaaaaaaaaaggaagaaggtctgagtagtcccaggtactcatgaggccgagatgggaagaccacccaggcaagactggggagatctcgatcacatccctctactggacctgaagggtactgccacaggtgagaaccatctggtcaaccttagacatggcaagctggtggctaagaccaagggtcatggctggcatctgtctcaaaattaataaacaaaaataccaacattacacatttaacaataacaaagaaataacaatattaaggaccaataaataaataagtgggagtgaaaaaaataaaaggtaattaatatcacagttaagatttcctctctctctctctctctccttttgtcacacccaggctggagtgtgacaaataaaaaataacctaaaaattcaactgcaatgtgcgcaaaggactataggaaaatagagaaaagaacaaacaagaaaaacaacagcaagtcactctaagtactgtgggacaaactgaaagtggggttaggaaaaaaaaaaggaagaaggtctgagtagtccaaggtactcaggaggctgagatgggaaaaccacctgggtgagactggaaagatcaaggctgcagtgaatcaggatggcatccgtctgctggatctaagtgggactgctgcttgcaagagccatctggttgaccttagacatggtgaaacatgaggcatctggaggaccttagacatggcaaggcaagagccatctggttggccatagacatggcaatctggtggctaagcccaatgctcacagccgacagctgtctcaaaataaataaacaaaaaacccaacaataaatatttaacaataacaaagaaataataacaaacaatattaaggaaaataaatgagtgaaaaaggtaaagaggataataaatatcacaatcaatattatcccctctttttttctctctttctccatttgtcacacccacgctggagtgtgacaaaaaaaaatagttaacttcagcttataggaaggagtgtaggaaaatagatagagaaagaacaaagaagaaaaacaacagcaagtcactagaaatactgtggaaacaaaccgaaagtggctttagaaaaaaagagaaagaagttccgagtagtcccaggtactcaggaggctgagatgggaagaccacgcaggtgggaccaggaagactgaggctgcagagaatcatgatcacatccttctgctggacctgaatggtattgccacttggcaagagccatgtggtgaatcttagacatggcaatggaggagccatcttgttgacctcagacatgtcagggcaagaaccttctggtcctgcctccagtttccctctccaaaatggatttatgttttaatatatttaataattctaatattgaaataactttatttagtttttattcatcaaaaatactaattttctgtataattaatggttagatttaatttaattagatttaaatgagaaattgccacaatcaaaactttttaaaagtacaactgtattttatagttataaaatgtacaaaatatgcaaaaattaaaaataaatttgtgacatattaaagtgtatctgtgtctgtaagattgagaaacatagtggataagcacattgtctactcctgaaactttctttttataatgaggtgactttagaaatgtcattcagccttcttttgtttaatatctcctcacctgtaaaaagggaacaataaagcacgttgtagatttatgataaaaatacatgtaaaacttgttatagtattctagagtagtactataatatagtgggaatatatgtttttctttttagaacaaaactgttacaaaaaaaggggttcaataaaatatttctgagttggaaacaatggcaagtatacggcagaatgttttggtttcctccataaagcagacgtcatctgtccatgaaagatctcctcacttggaatgaaattataagtcacttgaaaataacagattgtctccagtaatatagcagtaggaatgatcttatctcagaccatagttaaatagctgggattttttgtttcttggcatcagagttttctttatttaccacatgcacattatgatccacagatttgattctcaagcacctgactatggccaactccttggtactctctaaaaaaagtcctttagatgatgactgatttggagttgaaatattttctcagtaatattaaatagaaagtgttttctatgttcagagagtggccagagcatgtgcattgacaccatctgcctcttgagtatctcccaggccatcaccatcagccccaaaaacctcatgtgggcatagcttaaactacatgattccaaatatatttgaatctctaatatccaaattatgtgctgaattctgaataggcttataaatgtcatttttcctatgtatgttactggcaaatggaacacaataaacaacacaaaaattatttaaaacactgttctggagtagttaataacagaattccacatttatcacatgttgtgcttttattattttttaatgttttgtgtttggaacttttaacctgggccagcagctccatgacttttatcctgttcaacacaagtagtggggtccaacacattcataggtccaacaccactcctaaattctcacctgagtccacagtcacccaaaacatctttgtcctaaggagcacctttgtattattttacactctcttctacatcttttcagtatatacgttttttttaatttttttatttttttattttttagtatttattgatcattcttgggtgtttctcagagagggggatttggcagggtcataggacaatagtggagggaaggtcagcagataaacatgtgaacaagggtctctggttttcctaggcagagggccctgctgccttccgcagtgtttgtgtccctgggtacttgagattagggagtggtgatgactcttaacaagcatgctgccttcaagcatctgtttcacaaagcacatcttgcaccgcccttaatccatttaaccctgagtggacatagcacatgtttcagagcacggggttgggggtaaggttatagattaacagcatcccaaggcagaagaatttttcttagtacagaacaaaatggagtctcctatgtgtacttctttctatacaggcacagtaacaatctgatctctttcttttccccacatttcccccttttctattagacaaaaccgccatcgtcatcatggccctttctcaatgagctgttgggtacacctcccagacggggtggcggccgggcagaggggctcctcacctcccagacggggcggctgggcagaggcgccccccatctccgggacagggtggcagccaggcgggggctgcccccacctccctcccggactgggcagctgctgggcggagacgctcctcacttcccagatggggcggctgccggatggaggggctcctcacttccccgacggggcggctgccgggtggaggggctcctcacttctcagacggggtggccgggcagagacgctcctcacctcccagacggggtggcggtcgggcagggacactcctcacctcccagatggggtggcggtcgggcagaggtgctcctcacatcccagacggggcggccgggcagagacgctcctcacttcctagacaggatggcagccgggaagaggcgctcctcacttcccagactgggcagccgggcagaggggctcctcacattccagacgatgggtggccaggcagagacggtcctcacttcccagacggggtggcgaccgggcagaggctgcaatctcagcactttgggaggccaaggcaggcggctgggaggtggaggttgtagcgagcggagatcacgccactgcactccagcctggtcaagattgagcactgagtgagcgagactccgtctgcaatcccggcacccggggaggcccaggcgggcagatcactcgcggtcaggagctggagaccagcccggccaacatggtgaaaccccatctccaccaaaaaatacaaaaaccagtcaggcgtggcggtgcgcgcctgcaatcccaggcactggcaggctgaggcaggagaatgaggcagggaggttgcagtgagccgagatggcggcagtacagtccagcctccactcggcatcagagggagaccatggaaagtgggagacgggagagggggagggggagggggagggggaaggggagggttcttttttataatccaagttgttggcttatgaaaaactctaaactgatcactgcttgttttttctatagtcaggtccattgttctcataagccatgaccccagaatatccaggataacctcttcctgctatggaaggaatatacagtttcctaagatgatcacatagatctacattttatgtggaattatttttttaatgtgcagaccttcattcattattttatgcagaggtttaattaccacaaagagcagtcacatatcagagaacccatgagtcaccgactgagtccctgccctcatagaatttattatatggtagcaatgacagttacagactaaatgttttgaatagttctttgataattttctatttactaaatgttataataaagaaatttagaggccaaaattttattttaaaatggggcctctagtaatttggagacattggaaaacttatatgggtatgtagctttaaactaattaatttaaaacgtccactgggagctgtggctcatgcctgttatctcaacactttgggagtctgaggcaggtggatcacctggggtcaggagtttgagaccagcctggccaacatggcgaaaccctgtctctactaaaaatataaaaattaggtgtagtggtgtgtgcttctaatcccagctactctggaggctgaggcagaagaattgtttgatcccgggaggtggaggttgcagtgagccaagatagtgccactgcactccagcctgggtgacagagcaaggctctgtctcaaaaaaaaaaaaaaaaagccataaccggttcataggtacatcaagatggtagaatagaaggcttcaccaaccttcccccctgtaaggacaccaatttaacaacaacctacatttaaaatcaccttcataagaaacaaaaatcaggtgagcactcatggtacctggttttaacttcatattgctgaaagaggcactgaacgggtaggaaaaacagtcttgaatctcttacactatttctcccacatcccccaacaatggtggcatggtgcagaaagggagagttcagcaattgtgaggcattgaattcagtgctttcatgttataacagaaagaaaaaccaaacaaaactcagcttacacctgctgatggaggaattatttaaaccacatagttaaatacagttgctggtaatagtaagtacacagaaaatcaaataatattataacactgtaactgtgatgtatgaactactcttatgcaaggtagaaagactaaacaataaaccaatcaaaaataacaactacaacaacttttcaagacatagacagtaaaattacatataaatagaaacaacaaaaagtaagggaaaagaattaaagcatagagattttattattctttttgcttctttgtttattcaaacagtgttaagttgttattagattaaaataataggttataagatagcatttgcaagcctcatggtaagctcaaaccaaaaaacatacaaggaatacgcaaaaaataaaaagcacaaaactaaatcatatcaccagagaaaactaccttcactaaaaggaagacaaaaagcaaagaaagataaaagagaagaccacaaagcaaccataaatcaaataaaatggcagaagtaagttcttgcttatcaataataacattgaatgtaaatagactaaactctccagtcaagacagaggggatgaatgtatataaaaacaagacatatttatcctttgcctgtaagaaattcacctcatctatgaagacacacatagactgaaagttttagaagtggaaaaagatattcaatgtcaatggaaacaaaaaaaatgcggtagtagctatacttaaacattagaaaaatagattttaagacaaaaattataagaaaagacaaagaggttactatataatgataaaggggtaaagttaacgagactataacaattttacatataaatacacccaactcttgagcactgaaatatgtaaagcaaatattattagagccaaagagacagatagactccaatacaataatagctggagactccaacactccactttcagcattgaattggtattccagacagaatatcaacaaagaaatgttggacttaatctgtgctatagatcaaatgtatctaatagggatttagagaacatttcatgtaatggttgcagaatatacattcttttctttagcacatggattattttcaaggatagactatatgttaggccacaaaacaagtcctaaaacattcaaaaacttgaaataatatcaaatatcttatttgtccacaatggaataaaattagaaattaataaaaagaggaattataaaaactatacaaatacatgaaaaatcaacaatatgctcctgaatgatcagtgggtcaatgaagaaattaagaagaaaattaaacattttcttgaaacaaatgataataaaaacactacgtatcaatatctatgggatacacaaaagcagtactaacaggaaagtttataggtataagtgcctacatcccccccccaaaaaaatctcaaatacacaacctaatactgtatcttagagaactagaaaagcaagagcaaaccaaatctacagttattagaagaaaaaaatcataaagattagagcagaaaaaaaattgaacaaaaaatacaaaagatcaatgaaaaaattggcttttttgaaaagttaaaaattgacaaaccttcaacaaactaaaaaaaattttaaatccaaacgtaaaataatttaacaaacaaataaactatgatacaagagggcaaatgagtgaggcctacaggctccagggcaatgtaagagacctcagaagcctcctgtgcttccttgtttgcctccactgttctgaggtatccagttaactcacaagttcatcatcccagcctggaaaatgactctggttccacttccaaaaaagaaccccagagctatgacagggatggtcttcagagcagtgatctgatgctctgccacattctacactagcctgagtgctcagtcccacaaacccccaagcaaatttctgctctgaaaggcctccagaggatatggagaaatttccaaggatctgagagtacagtgggtaattgatagacagcaaggtcaactcacctttttgagcgttcgaaatttagatgccacccaggtcaattacttcaatttacagagaaaaatttgaggtttttcactactgtattccccttcatactgtgtgtagggggattactcccaattttaattacacagagcaatgaatgcagaaactaagtttttgtcctctaaaagctttcctggggatggccacagaacaggcagatccatgggaaccttgaggttcccaagtcatcagcctgttatcttttctcctccccatgttataggtcctgggcatgttacccaggagactgggtgcccctaccccgtggcagagctgccctcatcctctgtcttcttgtcactccatcagtgttaactgctcttctgacctttaacctgagaagtctgtgtgtgtgtgtgtgtgcacgctcatgcacggaaacctgtgcaagtttaatggtgcagatatgagtgtgctccatacgagaaaattggcagaaattctcaagatctcagggactctcattctcaaagcaaaccccgtgatagcgatgagccctggcctatgaggtcagaatgctcttttatcctctggactctgccaactttatgttctctgggccagtctctgcttctctccagacctcagtttcccagttatccagtgagatgttagatgtcaaagtgtttaagccacagctcagcatgcacacggtgcaagctccctaccaactaggatgggtgtagcagggctgtgatcagggtgtacccagatcttcctcagttggacagaaatagatgagttctgcactgggcagctggaccttctgtccaaaaaaggtcacgcgcacaggatccttcaaggaccacagacaatgtgcgcatatgagacccacctttatcccccagcagctcccactggagcatacccaatatgtcccctgtcctctgcatctagaaagtggtgacatcctcacttaacacatggactgatggaccctttgtggtggagtagtcccacaaagagaatctgagatgctattaactgtacaaggaactatggatgtgggccatatgaaggcactagaacttcagaattaaatcttccccactcctgcctccaccactatgcagataaaaaaatggtccttggaaagtgatatgtcttaccgaagattaccagggattccatgtcaaagctagcactttggttaggattacatttgcctataagtagaaggatgcccaatataacagtagtgcagacaagatacagaatgctttctttctcataaataagaatcttagagctggacagtccatgactctggactgtgcaccaaggcagtcaaaaattatctttttgctactttttttttctttttctaacttttaagttcaggggtacatgtgccggatgtgcaggtttgttacataggtaaagatgtgtcataaagattggttgtacagattgttttatcacccaggtattaagcttactatccattagttattttttctgcttctctccctcctcccactcttcacctcacaatatgccttagtgcatgttgttcccctgtatgtgtctgtgtgttctcatcatctagctcccatttataagtgaggacttgcagtatttggttttctgtacctttgttagtttgctaaagacaatgacctccagcttcatccatgtctctacaaaggacatgatcttcttctttttttatggctgcacagtattccatggtgtatatgtactatattttctttatccagtctatcactgatgaacacatggattgatttaaggtatttgctattgtgactagatctgcaatgaacgtgtgcgtgcatgtgtctttataatagaaagacttatattcctttgggtatatactcagtgatgagattgctggggtgaataatatttctgtctttaggtctttgaggaatcatcacactgtcttccacaatggttgaactcatttacactcccaccaacagggtaaaaatgttcctttttctccacaactttgccaacatctgttattttctgagtttttaataatagccattttgactggtataaaacagtatctcattgtggtttggatttgcatttctctaattattggtgatgttgaggttttttcacatgctttattagctgtgtgtatgtcttttgagaagtgtctcttcctgtcctttgcccactttttaatggggttgtttgcttttttcttgtaaatttaagttccttgtagatgctggaaattaaatctttgtcaaatgcatagttcacaaaaattttctcccattctgtatgttgtctgcttactctgtaggcattttttttttttttttttttttgctgtgcacaagctcttcagtttaattagatcccatttgtcaatatttcctttgttccaattgtttttggcatcttcatcataaaatattagcccatgcctacgtcctgaatcgtattgcctaggttgtcttccaaagtttttatagttttgggttttatatttaagttttaaaccatcttgacttaattattgtatatagtgtaaggaaggagttcagttctttttttaaattttactttaagttccaggatgcaagtgcagaacatgcaggtttgttacataggtatacatgtgccatgtggcttaccgcagcaatcaacacatcatctaggttttaagccctgcatgcattagctatttgtccttatgctctccctcttctcgccccccatcccctgactagccctgatgtatgttgttcccctccctatgtccatgtgttatcattgttcaacttccacttatgagtgagaacatgtggtgtttggttttctgttcctgtgttagtttgctgaggatgatggaggaagggggtcagtttcaattttctgcatatggctagccagttatcccaacaccatttattgaatagggagtccttttcccattgcttgtctttgtcaggtttatcaaaaatgagatagttgtagatatgcggtcttatttctgagttctgtattgtgtttcattggtctatgtctgttcttgtactagtaccatgcttttttggttactgtagcaccttagcatagtttgaagttgggtagtgtgatgtcttctgctttgttctttttgcttaggattgtgttgactattcaggttctcgtttggttccatatcaattttaaaatacatttttcttgttttgtgaaaaatgtcagtggtagtttaatgggaattctattaactctacacatttacttgggcagtgtggccattttaacaatattaagtcttatatcatctttgtttttttttttttttgagttggagtcttgctctgtcacctaggctgaagtgcagtggtgtgatcttggctcactgcagcctttgcctcccaggttcaagcgattctcctacctcagcctcctgagtagctgagattacaggtgtgcaccaccgtgcttggctcatttttgtatttttagtacagatgtggtttcaccatgttgctcacgctggtctcgaactcctgaccttgtgatctgcccacctcagcctcccaaagtgctgggattacaggcatgagccaccatgccctgctctgatttctttgagtagtgttttatagttctccttgtagaggcctttcacttcctttgttagatgcattcctaggtgttttattctattcatggtgattgtgaatgggagtttattcaggattttgctcttggcttgattgttgttggtgtataagaatgctagtaggccgggtgcagtggctcacacctgtaatcccagcactttgggaggccgaggtgggcggatcatgaggtcaggagatcgagaccatcctggctaaggcagtgaaaccccatctctactaaaaatacaaaaaattagccggcatggtggcgggcacctgtagtcccagctacccaggaggctgaggcaggagaatgacgtgaacccgggaggcggagcttgcagtgagcaaagatcgcgccactgtactccagcctgggaaacagagcgagactccgtctcaaaaaaaaaaaaaaaaaaaaaaaaaaaagaatgctagtaatttttgcaccttaatttttcatcttgagactttgctaaagatgtttatcagcttaagaagctttggggctgagacgatggggttttctacatgtaggatcatgttgtctgccatcaggcatagtttaactccctctctttctatttgaatgccttttatttctttctcttgcctgattgctctgaccaggactttcaatactatcttaaataggagtggtgagagagggcatccttgtcttgtgccggttttaatggggaatgctttcagcttttgccctttcagtatgatgttgtctgtgggtttgttatatatggcttttattattttgaggtatgttttttcaatacctagtgtattgagagtttttaacatgaatggatgttgaattttattgaaagctttttctgcatttattgagataatcatgtggtttttgtctttaattctgtttatgtgatcaatcacatattgatttgtgtatgttgaaccaaccttgcatcccatggatgaagcctacttgattgtggtggataagcttttttacatactgctggattttgtttgccagtattttgttgagaatttttgcatcaatgttcaccaagaatattggcctgaagttttctttttgtgtgtatgtctctgccaggttttggtaccatgatgatgctggcctcatagaaagagttaggaaggagaccctctgtttcaattctttgaaacagtttcagtgggaattttaccagctcttctttgtaaatttcgtagcattcagctgttaatctttttggtcctggggtgtttttggttggccggctctttattattgcctcagtttcagagcctgttatttgtcttttcagggattcaatttcttcctagtttagtctcgggagggcatatgtgtccaggaatttatccatttcaactagattttctatcttatgtgcatagaggtgtttataatattctctgatggttatttttatttctgtggagtcagtgataatatcccccttattatttctgattgtgtttatttgaatttttgatcttttcttccttattagtctatctagtggtatatctatattattagattttttaaaacaaacaaacaaacagctcctgaatttgttgatcttttgaatggtttctcatgtctctatctcctttagttcagctctgattttggttcttttttttttttttttttttgagatggagtcttgctctgttgcccaggctggagtgcagtggcacgatctcagcttgctgcaagctccgcctcccgggttcacaccattcgcctgcctcagcctcccgagtagctgggactacaggcacctgccactatgcccagctaattttttgtatttttagtagagacagggtgtcaccatgttagccaagatggtcttgatctcctgacctcgtgatctgcccacctcagcctcccaaagtgctgggattacaggcgtgagccaccatgcccagtgattttggttatttcttgtcttctcctagctccaggatttctttgctcttgtttctctagttattttagttgtgatgttaggttgtcaacccaagatctttctagatttttgatatgggcatttagtgctataaattttcttcttaacattgccttagctgtgtcccagagattctggtatattttgtctttgttctcattagtttcaaagaacttcttgatatctgccttaatttcattatttacccaaaagtcattcaggagcaggttattcaatttccatggaattgtatggtttttagtaagtttcttagtcttgagttctaatttgattgtactgtggtctgagacattgtttattatgatttcagttcttttgcatttgctgaggagtgttttactatgtgactatgtgaccaattttagacaaagtgccatgtggtgaagagaagaatatatattctgttgttttggggtggaaagttctgtaaatatctttcacatccatttgattcagagctaagttcaggtcctgaatatctttgttaattttctgtctcaataatctgtctaatattatcagtggggtgttaaagtctcccactattattgtgtgggggtataggtctctttgaagacctctagaaacttgttatagaaatctggttggtcctgtgttcagtgcatatatatttagtatagttagttcttcttgtttaattgaaccctttgccattatgtaatgcctctatttgtcttttttgatctttgttggtttaaagtctgttttgttggaaactaggattgcaacccctgcttttttctgttttccatttgcttggtaaaatttcgtccatttctttattttgaggctatgtatgttattgcatgtgagatgggtgtcttgaagacagcataccagtgggtcttggttctttatccacttgccactctgtgtcttttaactggggcatttagtccatttacatttaaggttagtattgtaatatgtagattcaatcctgtcatcttgatgctagctggttattttgcagacttgtttatgtggttgatttatagagtcactggtctgtgtacttcagtgtgtttttgtggtggctggtaataattttttctttccaaattagtgcttccttcaggagctattgaaaggcagatctggtggtaatgaattacctcagcatttgcttgtctaaagggaatgttatttcaccccagcttaggcttagtttggcaagacatacaattctgagttaaaatttcttttctttaagaatgttaaatattgacccacaacatcttttggcttgcagggttttaactgagacgtctgctattagtctgatgggcttccttttgtaggtgacctgacctttctctctggctgaccttaacattttttcttttcatttcaatttcaactttggagaatctgatttttatatgtcttgggtatgatctgtctatggagtatctcactggggttctctgcattttctgaatttgaatgttggcctggaaagcaagattggggacattctcatggatgatattctgaaatatgttttccaaattagttccagtctccccagctctttcaggtacaccaatcagttatagatttggtctctttacataatcccatttttctcagacctctgcttggtctattctgctattaatacttgtgattgcattatgaaattattttattgtgtttttcagctctaccaggttgattaggtacttctctatcctagctactttgtttgtcagctcctgcaatgttttattataatttttagctttcttgcattgagttagaacatcctcctttagctcagtgaagttcatttatatccacattctgcggtctacttctgttatttcagccatgtcagcctcagccccattctgaacccttgctgaagaagtaatatggttatttggagaagggagggcactctggcttcttgagtttttagtattcttgtgctgattctttcttacctttgtgtgcctatctacctttaatctttgaggttgctgacctatgaatgggagtttttgtttgtttgtttgtttgtttgtttttaactatttggccattctttgtagagctgctgcagttagttgggcatctgccccagttcctagttcttggatttttcagtatctggaggtatcaccactgaaggctgtgaaacagcaaatatagcagcccactctttcccttgggagctccatccccaggggaggtgcagacatgttgctggcccaaacacatctggaggaggcgactggagatcccagttagaaggtctcgcccagctaggaggaacagaattggggacccacttaaagaagcagtttagccccactttaatagagcagccatgctgtgctggggtaccatttttgcccctcatcagggtgggctctcccaagcctggaggctgaaacagctacattgcaaaacagcaaagatgttggcccaaccctctctctaggaactatgccccaaaatgttttcaaacctctgttgcccagagaacatcagtgggagtagctggaggctctggttgggaattatctctcagagatgaggagcatatcatagtcccgcttaaagaagcagtctagtcacattatggtagagccactgtgctatgctgggagattccttctgtcccttgatgatttggtctctcctaagcccacaggctagaatggctgagttgtccaaacaccaaatacggtgtcccactccttccactaggcactgcatcccagagagaaatcaaatccctgtctgccagagaatatgggaggggccggctggagtccctgataggaggccccaccctgagacaaaaaatgtgtcagggttccacttaaagaagcagtctggccacattttggtagagccactgtgctttgctggaggtttctttccataggctgtcagttttgtttggactttcctaaacccacaggctggaatgactgagtcatccaaacagcaaatatggcagcctgcccctgcctccaggaactctgacccatcccaggtagatgcaatgccattgctggggagtggctggaattcaaagccagtgggtcttatcctgtgaagctctatgaaagtggggtccacagactgatgctgctcagccccatggattcagctttcttcctaggggtgtttacagaggtccaaattcttgcattttctgagtagctttcacctttgccagagatcccggagccagagtatctaaggctcctgagattctgtttgtgcctgagtagttgctctgccaagaccatgcagctctgtgtgtcagaccaaaagccctggtggaatgggttcaagagaaaatctcctgacccaaggatggcaaagatccatggaagaagtgtggttttccaggatcacacagtcactcatcacttccctgggcagggtagtttcccttggctctgtgtcattcatgagtggtcagtggccctgtcctgctttcctccattctccatgggttgagctgtttccttcatgagtcccaaggcaaatacttgggtgtttcagttgaagatgctgcatttactctcttcttgttcctttccatgagagccacacatcgtagctgcttctaatcaggtatctcagcatccttctctgctacaatattttggtagatggtttttatgctgtaggctgtctcatggcccaagatggctgtaggagcaccagcctgcaccaaccaccatgtgcatttcaaagagcaaaggaggagaaaaggtgcaaagtcaaagtgactcacacagctgtgttagcttcaactaaggagtctccccaaagttccatcaatacttctgcttacacccaaatgtcctgaacgtcctctagtcattgtcagcttcaataggggtcaagaactatagtttttgtgtctggtaacttgctgtttgaatgaaacagaatctctctttttaagaatgaaagaaaaataaaaactgtggcaatgaccagtgctcttttgctacactaaattcaaagataaagagaagaagatggagttattctcaggtgaagtgggcacttattttccaaacaaagcctcttttactgtttatttattttcagattagatgggaaaaagtcttcattctgacaagcactccctttatgaccaaaggttagtcaagcttaactgaaccttctttttgactaagccaaccttgacttactaccctactcctggtttgagaagctcattttcagaaatcctgctaagattgcttagtaagaatccacatattctttacagcttctgaaaacttaattccccttccttgatatttaagtcgttagcctgcctgtagccataatcctgttggaaaacaatctctcttcttttggtattttatcaaatttctctcagtaattttttatccactgatctattctttctattgactataaatcctgagttgtctgtgttcagagttgtgatcaatttttgaatcctattaaaatggccataacatctactgcaatagtattaaagtctttctttccaatttttaacaaatgtcagaattaatttatttgacagttgcccaataggatgtttgagtataaaaccagttttcagttccaagaaaaatgatgtggataatatgtagttgtatctgcaagtgtatctgaaaaattatcttctttttcaagtggggtgtgggtgaaagattatggagccaacatgttcctaaaatgctgagtcataattcaaaccatacaaatcaaagaggtagaatgcttggaccccaacatttttaaccttgaggatactttgatgcccatgctcaaaagtattgtgaaactggcggggtgcggaggctcatgcctgtaatcccagcactttgggaggccaaggtgggtggattacctgaggttgagagttcgagaccagcctgaccaacaatggagaaactctgtctctactaaaaatacaaagttagccaggcttggtgatacatgcctgtaatcctagctacttgggaggctaaggcaagagaatcagttgaacttggtggatggaggttgtggtgagctgagattgtgccattgcagtccagcctgggcaacagagtgagactctgtctcaaaaaaaaaaaagtatttttttgttgctcctatgtgtgagcaagaaatttactaaaatcacaactgtcattcaatgccaagtcaaaaatgtttcttttcattccgattaatatagaaacagagataaactagctttaaaggcactaaccaaaattgaaaatgctgactaattccatttaaagcttacatcttttcaggaactgtttatttttgaacatgtgacattggaacacaattttgtaattggtttggttgactgaagaagtgacttcttgaattggggtagaaaagccaaggtctgtaaattgaagatagactgcaatattgaaagcaaatttcagattcctttgcacactttaacttgaaggttaacagatataatatatgtagataaacacatacaaacacatacaatatataaatatatctatgtaatgtccatttatgagtatgtcttataaaaaaaaaggtaagtcagagatcatttccctacttattcttctcaggggaggtgaatacaagcaacccacttactcagccctgattatttcaatcagccaattagctcagcccagtgtattccaattagccaattaatttggtctaggtaattctgatcagccaattagctcagatcaggtaaatccaatcagtcagttacctcattctaggtgatttcaatcagccaattaggtcagcacttttgatttcaatcagtcaattaactcaaatcaggtcattacagtcaattaaccaatcccaggagattaaaatcagccaattagtttagcccaggtgactccagtcagccgatatttgagcccagatgattttaactggccaataagctcagcccagctgatttcaatgtcagttagctcagcccaggtggattcaatcagccagttctctaaatttcaactgtagattaatcaagactggcccccagtggtgcatgagaatagctcatgcatacactgagaaggaaagcaaggtccagaaatgttaacctgcacagaaagtgttacatgactttactatcagcttatttcccaaaccttgcccctgaaagtgaagctttgtctatacaaaaaacattctatacctatgttccattctgacatgctactgagccagagaagagaaataattctacatctgcacccttagaatatgctaagatactgaaaaatgtctttggaggaacaatttttgtgtacatatttacatagaaatactcatataatcttgtatatgtatcaatctttgtatatacattcatacagaacaaagatgtagaaggtggaagaattaataggtactggtaccaatagtaatgcaaatagaaactaggatctcacacatggatcaagtcaattgttgagactacgactcatctatttggatccaacacacaggtgttgactctcatacctagaacccggacctgtgtgagattgttaatctcattattggaccttcctgcaggtgtgattgtgatatatgcaccttcacagaaccttcatgatttgacacatctgcctgggcccagcccagatggaattgtgacatatcactggactcagcccctaggtgatattaccctattcttctgctttagcgctgctcacaggggaattgtaacgtatcaccgggccttatatccaggtgatgtgaatcttctgctttgtcgctgcccacagggggcatttcaacatataactgagccctacacccaaatatgtgactcccttgtctgtgtctggcccatatcagccattgtgacatgttgcttggtctaacacccgagttatataactcttgtgccctggccctgcctacagagagcattgtgagatatctctgtgtccaccagagaggtgatgtgactctcttctcttcgctgttcccttctcaaatgggtgactatgacatatcacgggccaagtgcctagcttatgtgacttttcctttctttatttttttttcttttgagatggagtcttgctgtgtcacccacactggagtgcagtggcgtgatctttgcttactgcagcctctgcctcaaaggttcaggtgactctcctgcctcagcctcctgagtagctagaattacaggtgcctgccaccacacccagccaatttttgtatttttagtagagacagcgttttgccatgttggccaggctggtcttgaactcctgacctcaggtgatctgcccaccttgacctcccaaagtgttgggattacaggccaccgtgtccggccaactttttccttctttacacgttctgcccacaaagaaaagtgtaacatattgctgcactcaacacaaagattatgttactcttttttggttctgctctcaaaacgtattgtgatgtattccttgtcctacctctattgtgatgtgagtcccctgcctggtccctgtccacaaggggcaatgtgatatatctctgggcccatcaaccacttgatgtgactctgctctcttacccgagcattgcccaaaaaagagattggggcctatctgcgaatccagagcttaggtgatatgacccttctctcctgcctgggccatacctaaaacagagagagtgacgtattgcttagtccagcatacatgttgtgtgacacttcttcctgacctctgcccaaacaagtaacagtgactaactcaggttttgttacctaaatgatgtgattctctttttctggggacctgtccacagtgaaggttgtgacaaattgcttggtccagcacctatgtgatgtgactctactctcatgcctgggacctgtccactgggtgattgtaacatacagctgagctcagcttctagattatgtgactctctcctttttcctgagttctacccacagggggtactgtgagatatctctgggcccctcacctaagtgatgtggctctcttgcctgtaccctcccctcagcaggtatggtgacacattgctggacccagcaccaaggtgatgtaactctcctctactacttcggctgtgcccaaaaaaggattgtatagctgggctcaacaaatgagtgaagttactattgtctcatgcctcagctctgtatacactgtatattgtgacatatttctgggtccaacacctaggtgatgtgactctcccgcatgggtcctgcccacaaaactattataatatgtattttcattcatcacctaggtgatgtaacttttctttctgcctgggtcttgccaaaatagaaaattgtgatatatcattggatccagaacccaggtgatgtgcctctcgttttttttgcctgggccctgcataatttgggtattgtgacatatcattgggctcaacccctagcaggtggaaggcttcagtctggaccctgcccacagaagaccttgtgacatgtctctgcatccatcacatgactctcgtcttctgcctgcatcatacccacaggaaagattataacatatcactaggttaagaaaccaactaatgtgttttgactgcctgagtctttcatacagggggcattttgacatatctctggcaacacctactatctgatattactcctcttttttacctgggttttgcccatgtaaaagattgtgacatatctcttgacccagcgcttaggtaatgtgactctgctcttctgcctgggccatgtccacagaaatgagagtgacttatcactagggccagcacacaagtgatgtgattcttctgcctggtctctgcctaaagaggtcattgtgacatgtctctgggcctatcatcatggggattatgacatatcactttgcccagcatctatgtgctttgacagccttctctttaatggacctgcccactagggtgatttgtgtcatggagcagagcccaccttctaggttatgggactttattcttttttgtgaatacccaaaaatggaatatctctgacattctcaccaaggtgactctcttttcctgggccctcttcttaggggcatttgtgacatattgctatacccagaacctaggtaatgtgactcttttttactgcttgggctttgcccaagaagtgcttgagatgtattgctgggcctagcacctaagtaatggtgactctcctctccttccaaaatactgcagacattgtgatatattgctgagtccaacacctagaaggtgcaacttttctgcagaagcactgcccaaaggagaataatgacatatcttttcattcatcatctagatgatgtgactcttctcttctgtctgggccctgccaaaaaaaaaaaaaaaaaggttattgtaacatatcaatggattgagcacctaggtaatgtaactcttctcatttccctgggccctgcatatgttgaatatcatgacctaatgctggtcccaacttatactgtatgagagactcctgcctgggcgatgaccaccagaggccttgtgacatatctttgcacccatcacctaatagatgtgactctcttcctctgcgttcatgctgcttatagaaaagattgctacatatggtggaacccacgaaccaggtgatgtgtctttcatgcctgggtattacccaaaggtaacagtgtgacatatcattgagccctgaatcagggtgatgtgctgctgttgtctgtgccctgcttttagtgtggaattgtaacatatccctggctgagaacccaggtgatgtgtctcttttttctggtcccttctttcagaaaagtttgtcacatatctctggcccagaacttaggtgatgtgactcttctgtttgctccctacacacaggtaggattttgacatatatattggctcagtgcacaggtgcaataatgactctaatattttgaactggctaagaggacaaatactgtctgtcatagctaggtgtagaaaaatgggtaagatcctgggtttcctttctgtatggaggttataaaaggttaccactctctcgcatattgtataaagcccttgggtggtagagagagtgtcatcacaaggcccagcgtgcagatgagattgtgtttcttgtgtgctcatcctgacaaccattaggattgtcaccctcacacatggatgaagcccactggtgaggtacttaatctcacacatggatgcagtccacagttaaaattgtgacattcatttgtgaatttctgtccagagttgtgatggtgactcatttctaaacccagctctggcaggtgaggactctcctatctggacccagccaatcagaaagatgtcgactgtcatacctgggcttaaagctacagacactatcatgagtccataacagcacaaaggatttagaggaagttgtgactcccatgcataccatataaagcccttgggtgataacagaacatgtcttaacatggccctgaacaaaggtaagattgtgacactcttacacacacacagcaaagagtaaagatgatcatcctttcacagcccactgttgagcttctgaatctcatacctggagacagtcaaaagttggaaaattgactctcatgagtggatctggtccacaggttgactgctgtctctcagatcaaaatctagcacacctgtgagactgtgattctaataagggaacacagtacacagaaaaaattgaggctctcatgagtggattcagtccattgtagagattgtggctcatgtatatagaagcaacatacaggaagcattgactctcatacctagaatttggacctttgtggaatttttaatctcatccttggaccttcttgcacgtgtgacatgtgcctcttcccagcacccaagtgatttgactctccttatgtgggcccagcccacagaagggattatgacatatcactgaacccagtagctaggtgatgtgactctactctttccttgacaatgtccacaggggcattgtgacatactggtaggccttgccccccaggtgatgtgagtctcatgttctgccttggtgatgtctacaggaagcattgtgacatatcgctggactcaacaccaaggtgatgtcacttttttgccttagctctgccttcaaaaggcactattacaaattacttggactattaccaaggtgagttgagtttcttgcttggaccgtccccacagtaggcattgtgacatatcacctggaaaatgtgactcttcacctctgcctacaccctgaccacagaaagaattttgacatatcactggatccagaaaccagatgatgtgtttcttttgccaggacctgggtcatagaaaatattgtgacttatctgtgggtctcttacctaggtgatgtgactcactctcttgcctggggccttcactcagagggtattgtgacatattgctggaccaagcatttaggtgatgtgactttctcaacatcttggactctgaccaataaggaatttgtatgtgttgatgtgcgctgcatccaggtgatgtgactctcctctcctgcctgggccctgcacatattgtgtgttgtgacatgttgcatgttatcacacctaggtgatgctactttctcgcataagtcctgctcacagaggcattacgatatattttttatgtctatttcctacgtgatgtgtctctcctcttctgccggtcttgccaaaagtggggattgtgacatattactggacacagattctaggtaacatgacactcctcttttgtctgggccctggatatttagggtattgtgacgtatttttgcactaaacatctagaaaataaaaggctcctgcctgggccttgcccacaggaggcctgtgacatatctctacatctatcatttaggaaatgtgactctcctctttggcctgcaccctgtgcacaggggagatggtgacacatcactgagcctgctcagcaggtgatataactctcttttcctgcctggcccccacgtatattgtgtattgtgaaatgtggctgggtccaacacctaggtgacgtgactctcctgcatgggtcctgcccacaaggttattatggtgtgtcttttgttcatcactaggtatttcaaattttgtcttctgcctaggccatgccaaaaaaaaaaaaaaaaagtactgtgacacatcactggagccagcagtaggtaatgtgcctttgctgattgggtctagccacagaagactttgtgacatatcgttaggcccagcaaccaggtgaagacactctgctgccttagtcctgctttcaggaggggattataccatatccctggctgaaaacacaggtactgtgactctcttgctggtccctactctcaggaaaaattatgacataaccctagcccagcaacaacgtgatatgactctcctgcctggtcactgccctcagagacggttgcaaatatctctggcacagcacccagatggtgtgattctcctgctcactccctccttacccaattgtgggactgtcatatatatcttagttcagtttacaggtgtcacaatgactctcataacttgagccagccaatatgaaagatactatctctcttagctgggcttaggaaaatgggtcaaatctaggtctcatttttgtatgaaggtcatagagaattaaccactgtctcgcatttcatagaaagtccttgggtgatacagagagtgtcaacacagagtccaagacacaggtgaggttttgtttctcatcattttctcacttgaacaaagcccattattgaggtcctgaatcttataggtggacacagtctagagttgagattgtgactatcatacataaacatgtaagcacagttgggatgatgactcattttaaggtcagctcataggaaggtgaacattcttcattctggactcagctaattggagagatgttgactctcatacttgggcttaaggccacaggtacaatcatgattcataccagcacaaatgtctcagagcagattgagaatctcatgcatcaggtataaagccctagggtgatacataggtgagattgtgagactcaccaagtcgacagaaaagattgtcatcttcccacatgaacacagcccattgttaaggctctggatttcacaaccaaaagcagtcaaatgttggaaaattgactcttatatgtgaatctggtccacaggtaggcaggtgattctaagaccaatattcagcacacctgtgaagctgtaacttcacccagataaaacagcacacaggaaagattgtgcctctcatgcacagatccagtttattgttgagatgaactcatgtacttagacccaacatatatgaggtgttaactcacatacttagaaacaggacatggctggattgtaaatatcattctatgactttcctacaggtgtaaatgtgatatatgcctctggccagcacctgagtgatttgacctacagtctgggaccagcccacatacaggattgtgacttatttttggacccagcacctaggtgatgtgactctattatcctgccttggtgctgcccacagggcacattgttggaactcacttctcctgcctggttcctgctcacaggggggattgtgacctgtgactaacccagcacctagctgatgtgactcctcttctttttatgttcttccctcaggggagactgtgatgtatcagtgggcccggaagccaggtgatgtgtctctccttcatgttccttgctaacagagaacattgtaatttactgctgggcttggcatccaggtgaggtgactttgctgcccgtgtcctgctttcaggaggggattgtaacatttatctctggcccaggtgagattgtgacactcttatgcacacaaaactcatagtaaagattttcattcttgcccatgaattcagtttactgcttaggttctgaatctcacattaggaggaagttaaaagttggataattgactctcatacatggatgtaattcacaggtgggttggtgaatctcagactatgattccatgaataagacacagtccacagaagggattgaagttctcatgcacaaattcagtccactgttaatattgtgaattttgtacttagacccaacatacaagaggtgtttgctctcatagccagaacagggacacgtgtaggatctttaatcttatccttgaacctacctgcagctctgattatcacatacacttctgccaagtacctgagtgagaatgtcacaatacaggcaaataccctaggtgtaggtccatgaatgtcacatggaattgtgacatatattcctgcccctagcacctagggtgtatgttttttattcttttgtcttggcattgcccacattgcatcttgtgacatattcctaggtctaaaacccaggtgatgtgagtctcctgcctagattctgcgaacagggggaattgtgacatatttctggacccattatctatttgatgttattctcctctcttacttggtatttgccaacaggtgacattgtgacacatctctgggcccacctaggtaatgtgactcttcttttcttcctgggctctgatcacagaagggagggtaacttgtccctggatgcagcccacaggagatgtgattgttcttgctggttcctgtccataaagacaagagatacacacattgtgatgtatctctgcgaccataaactagattatgtgactctcctttatttccagagacctgtccacagtgcgagttgtgacatatcacttggcacagcatctgtgttatgtgactctcctctcatgcctgggccctgctcactgaggttgtaactgcagctggccccagcccctaggttatttttctcttttcttcatcctgaggcttacccacagaaggcatgtttacatatttttggaaccctccccagatgacgtaactcttcttcctgggctcttttttcagggtgtattgtgccatatttttgggtccagcagcaaggattacctctactgcttgggctttgccctaaaagagattgcaatttattgctgggcacagcacctaggtgatgtgactgtcctctcctttctgggctctgcatatattctgtattgcaaaatatgcagcacctatgtggtgtgactcttctctcatgtttgaactcttttcactggagtgattgtgacatatacgtcagcccacctattaggttatgcaacttccctcttcattctgatctttacccacacagaaaattgtgacatatttctaggcctctcacctagatgatgttatcgttttacatgggccctcctctcaggggtcaggtattgctggacctaaagcaggtggtgtaactctctttgactgcttagcctttgttcaaggaaaaattgtaatgtttcaatggattcaagacctaaatggtgtgactatcatctcttgcctgaggtattgtgacatatggctgggtccaacacctaggtgatgtgactctcttgcatgggccctgccaacagaaggcattatgacatatctctgggcacaccaattatttgatgtgactctgctgttttacctggactctgcccatagaagagatagtgacgtatctctgggccaagcagctaggtgttgtgactcttctcttttgcttgtgtcaggcccacagaagggataatgaattaccactaggcccagcacacaagcaatgtcattcctctgcctggttattgtccacaagggccactgcaacatatctttgggcccatgacctgacctaggtgatgtgattctcgttttctttcttggacctgtccacagtggaaattgtgacatattgcctggtgcagcacctacataatattactctccacttttgtctgagccctgcccatgggtgtgattgtggcagataagtgagcactgactctatgttatatgaggcctctctttttttctagccctacctaccagagacattgctacatatttcttgtcccctcaccaaggtcatgtgacacttctgtctaggcctttctctcaggaagtattgtaggaaatttttgtacccagaacctaagtaatgtgactcttctctacttcttgggctctgctcaaggaggcattgtgtgtatccctggatgcagcacctaggggatgttactctcctctcctgcctttgcccaacatacattgtgtattgtaataaatggctggactcaacaagtaggtgatgcgactcttctgcatgagccctgaagacaggggtattatatgatacaatttattcatcacctaggagatgtgacacatttttgttgcctgggacctgccaaataagaagattgtgacatatcacttgacccagcatctaggtgaggtgattttttttttttttttgcctggtccccacatgttttgggttttgtgacatattgctgggcccaatacctagaaaatggaaggctccgcctggggcctgtccacagtggatctggtgacatatctctgcattaatcacctaagagatgtggctgtcttcttctccctgaaccctgcttacagggaagattgtgacatattgctggcatcagcaaacagacgatgtgtctctcgtaattgggccttgcccacagaaagcattttgacatattgctgggcttattactgaggtgaggtgactctgcagcctgcaccctgcaggggttgtaacgtattcctggctgagtacccaggtgatgtgactcttctgcctggtcccttgtgtcagggaagattgtgacatattcctggcccagaatacaggtgatgtgactctcctgtttgctccctacccacaggtaagactgtgacatatatcttggtccaactaacagttgcaataacgactctcatgccacacatcagccaatagaaaggatactgtcagttttagctgggattagagaaaagggtaagatcccatgtctcctctttgtatgaaggttatagaaaattaccactttctcatacatggtgtaaatccctagtgtggaacagaatgccatcacagagcccagcatccaaatgagattgggtttctcatattcttacactaccatccattgggattttcacccttacacgtggacagagcccacaggtgaggtcctgaatctcacaggtcgacacagaccacagctggaattgtttccgtcaacacagaccacagctggaattgtttccgtcatatgctacagttgggatggtgactcatttcttttcttttcttttttttttttgaggcggagtctcgctctgtcgcccaggctggagtgcagtggcgcgatcttggctcactgcaagctccgcctcccgggttcatgccattctcctgcctcagcctcccatgtagctgggactacaggcacccgccaccatgcctggctaactattttttgtatttttagtagagacggggtttcaccgtcttagctaggatggtctcgatctcctgacctcatgatctgcccgcctcggcctcccaaagtgctgagattacaggtgtgagccaccgcgcccggccaggtgactcatttctaaacctagttcataggtaggtgaggatgctcctatttggacctagccaattggagagaagttgacccagacaagagcttagggtaaaaattataaacatgggtccacaccagcagggagatctcagagcatattgagactctcatgcataaagccctctggtgctacaatgagtttcctgacaaggcacagcacaggtgagattttgactcttgtatgcacatccagttgacaataaagattgtcatactgccacgtgaacacggccaacttttgaggttctgaacgtcacatttggaggcagtcgaaacttgaaaaagtgactcttatatgtggatccagtccacaggtaggctggtgactctccgtccaagattcagcacacctgtgaggctgtgactctactaaggaggcatagtgcacagaagaaagcgaggttcccacgcacagacctagtccaccattaagattgtgactcatgtatttagacccaacatagaggagatgttgactcccatacttagaattgggtcatgtgcaagaattttaattttatccctatatctttctgcatgtgagattgtgtgacatacacctctgtccagcaactaagtgatttgacccttctgcctgagcccatcccacagatggaattttgacatcttgctaaacccagtaccttcatgatgggactctagtccactgccttggcaccgcccacagacagcactgtgacatatcactgtcactaggccttatattcagttaatatgagtctacccttctgttttgtcactgtgcacagaaggcattgtgacacccaagttatgtgattctcctgtctgtaccctgcccacatggcccattgtgatatattactgggtccaaaactcagatgatataactctcctgcctggtccctgcctacaggaggcattgtgacatctctgcatccattacctaggtgatgtgactcacttctgcctgatctctgctcacaggggatattgtgactcatcactgggcccagcattgagttgatgtgactcttctattctttttaggttctgcctgcaggaaaggttgtgatgtgtctctggacccaacggtaaggtgatgttacacttttgccttggttctgacctcagaaagctttctgacatattgctgggctcagcaccaagatgatgtgagtctcttgcctggaccctgcccacagggggcattgtgacatatctctaagttcatgaactatttgatgtgactcttcttgcttacttggtctttgccattagaagagattatcacgtctctgattccagtacctaggtgttgtgactctccttgtttgcctgcgctatgcccacagaaggtagagtgaattatccctaagcccaacacacaggtgatgtgattctactgcctggtcattgcccacaggggtcactgcaatgtatctctgggcccattacctagatggtgtaattctccttatttttctgcttctgtccccagtagggatggtgacatattccttcacccaacatttatgtgatgtgattctcctctcatgtctggactctgatcactgttgtaattttgacatagggctgggctcatctgtctaggttatgtgacaggttatgtgactctcttctttcttcctaagccctacctacagggagcatgggtacatagctctgggcccctcacctaaatgatgcaatcctcattcttgggcccttcactcagtgagtactgtgacatattgatggactcagcacctaggtgaggtaactctcttctacttcttgggctctgaccaaggaggtattgtgacgtatcgctgagcccagcacataggtaatgttactcttttctcctgcctgagctcagcataaattgtgtattgtgacatatggcctatcttaacaactatgtggtgcaactcttctgcatgagccctgcccataggggtattatgccatacctttttgtttatcacctgggtgatgtgacacatttatttttctgcctgggctctgctaaagagggttattataacatatcttttggcccagcacctatgtgatgtgactgtcctttctcccaggccccaaatatttggtgtattgtgaaataacactgggtccaacacctagaaaataagaggctcctgcctgggccctgcccagtgggccttgtgacatatatctgcatacactacctaggacatgtgactcttcttttctgcctgcaccctcctaacagaaaagattatgacacatcactggaccccgcgacaaggtggtgaggctcttttgactgagtcttgaatacgtagatcattgtgacatattgctgagccctcacagaagattgtgacatatatctggccccaaaccaaggtaatgttactctcctgcttactcccaatccatgagtgattgtgacatatatcttggcccagctcacaggtgatgatgactctcataccttgaactagccaatgagagagatactgtctcttatagcaaggctcagggaaaaaggtaagatcctgggtgtcctctttgtacaaaggtcacagaggtttaccactctcttgcatgttgtataaagcccacaagtggtacagagagtgtcatcacaggtccaaggacacaagaaatactgtatttctggtatgcacaccctgccaatccttaaaatagtcatcctcacacatggacacaacccactggtgagatcctgaatctcacacgtagacacagtctacagatggaattgtgtcagtcatatgtgaacatctggacacttatgggatagtgacccatttctaaacccagctcataggcacatgagtactcttctatttagacacagccaattggggaggtgttgactctcatacctgagcttagactgacacgtacaatcatgggctcatatcagcatgaaggtcttaatgcagattgcaattctcatgcatatcatattgtattagttcattttcacactgctataaagaactgcccaagaccaggtaatttaggtagaaaagggatttaattgactcacagttccacatagctggggagacctcaggaaatttataatcatggcagaaggagaatcaggaaccttcttcacaaggtggcaggagggagaaagtgaataaagaaggaacttccaacacttataaaaccatcagatctctgagaactcactcactatcacaaaaacagtatgggggaaactgtcccatgatccaatgacctgcctgctttgacacatggagattacaattgtagatgagatttgggtgaggacatagagccaaaccatgtatctcataaattctttgggtggtacagagagtgtactaacagagcccagctcaaaggtgagattgtaatactagtaagcagacacagtcaagagtaaagattgttgtcctctcacatgagcatggcccactgttgaggatttgaatcttatatctagaggcagtcaaaagttgcaatgttgactctcatacatggatttttgttatgcatggatttgttgaccttcaaaccataatttagcacacgtgtcaggctgcgacttatctaaggggacacaatgcccagaaaacattgagaagctgctgcacagatccagttcacagttgagattgtgactcatgtacttcacacaacatacaagacatgttgactctcatacctagaaccagaacatgtgagggattgataatctcatctgtggattttttgaaggtgtgattgtgacatacgcctcagccaaacacctgatttgactctcctgcctgggcttcgttcacaagtagaatggtgatatactgctggacccagaacctaggcgagatgactctattctcaagccttggtgcctcttacaggaggcattgtggcatatcgctgggacttgcactcaggtgacgtaagttttctctcctaccttggtgctgcacagaagggacattgtgacacatcactcattctaacacttaggcgatgtgactcttctgcctgggcccagcctaaaaaggggattgtgatatctccctgcactcctcacccaggtaatgtactctcatctcttgcttggagggatggtgacatatccctgggctcagcacctagctcatgtgacacttctcttcttcctaggttctgcccacaggggagattgttacatatatcctgggcccagctccaagatgttactcatttgccttggccctgtcttcagaaggtattgtgacctattgctgggcccaggaccaaggtgatgtgactttcttgccttgactctgtcaaaaagggggcatctgtgggtccataaatatttgatgtatctttcttttcttaccagggtcttgcttatagaagagattgttacatatctctgttcccagcatctaagtgatgtaactctcctcacccgcctgggccacgtccatagatgaaatagtggcttatccctgggcccagaacacaggcaatctgatttatttctcctcatctctttctacagggggcattgagaagtatctcttagcccatcaactatttgatgtgtatctcttctcttacctgggctttgcccataggggatgttgtaacatatggcccagcatgtaggagatgacactctcctctgattgttacatattgctttgctcaccacctacttgatgtgactctcctctcatgcatcgtccctgccccttgggggtgattgtgacatatagctggctgtagcccctaggttacgtaactttcctcttcttcctgagccctacccacagaaggcattgtgccatatctctggggctctcaaacctaggtgatgtggcgctcctgctttggtcttcctctcagaaagtattgtgatgtattgctggacctagaacctaggtgatatggctctcctctactgtttggtctctgaccaaaaagggattgtgatgtatcactaggcccagcacctaactgttgtggctctctactttctcctaggcactgcatacattgcctatggtgacatatgtctggatccaaaaccaaaacaatgcaactgttttgcattggcaacgtccacaggtgtattaccacatatcttttcctttagctctgaaattgagctctgaaataatctggattttttatctgtgtgtctctcctgttgagtttgaactttaatccaaaagccatgaaaagagtcataattactgtcacaaagtgataacttttttctcctcctcctcctttttcctcctttccatctcctccattccttttcgtcttctcctcctcacttttctcctcctctcctcatctcttcttcctccccattcatgttctcctgctcctttttctttctcccctcttcttcctcacctcctcctccatttctcccccacctcctcctccacttctcccccacctcctcctccacttctcccccacctcctcctccacttctcccccacctcctcctccacttctcccctttcttcctcctcctctccttttcttcctctcatctttcttcccttcctcctcctctcctttttactcccctccaccacctctcctcttccatctctcctcctccttttcctctttttctcctcgtcctttctcctttttgtttcctcctcctttcctcatcctcccgtttttttcttttcttcctcctcccctccccttgtctccttttcctctcctccttttcagttcttcctccttttccttcgcctctcctcctctccacctttttctcttcctccttctcctatccacattctcctcttcctcttacttttcctttctctccttcttctcctctcctttctcctctcctcctgttccttttcttctttcttctctcctcctcccctccttctcttcctcatcttccttttctccatcttctcctcgtcctcctcctcctctccccctcctttcctcctcttcccttcctcttcctcctactctcttccccctccttttctttgttcctactttcctccttctccccattcttttccttttttctcctctacttctctgtcctcttctcctccgtcttcttcctatcatcctccttttcctttcttctcctctactcttctcctccttttcctttttctctcctcttcctttttccttttcctcttctcttcctcccatcctccttttccttcttttcctcctccttttctcttctcctttctcctcctccttctcttctcctctcctcctcctttcctcttctctcctcctcctctacttctccttctttatcctctcctccttcttttcttctacgccttctcctcattctcctctcctctttttctcattcttttcgtctcctccttctctttcttcttcctccttctcctctttttctactcctcctacttttcctttttcttttctcccatccttttcctcctcctattcttctcctcttcgtttcctattttttctcctcctctcctctttctccactcctttcttttctcctcctccttctcttctcctttcctcctcctctccttcacctcttcatctcctcctccttcttctgctcccgattctcctcctctcctttctcttcgtcttctcctcttccttgtcccctcctcctccttgtccatctcctctactcctccttctcctcctcctccttctcttcctttcctcctttcctctttttctcatcctctcctcctcctctcgtcctcttctcttttcctcattcttttcttcttctcctccttttttctccctacttcctcctagcttcccttttctcctctcctctcctggtcctgttgtccccctctcctttttttctccacttcctctcttcttactatcttcttctcattttctcttctagttcttctctttcctcctccttttcttctcttctcctcctcctctttcttcactcctccactcctactccttctcttactgtgccactggccatgccaaacagcacccagcacaagtagtggcaccctcttcagcgctgcgctagaaagaactgatgtgcatttatattagcttttggaggatagtactaatccggcctaactcaggcggccaagtatatatatatatatacgtatatacatatgtatgtatatacgtatgtatacatatatatatacacatatatatttatagatatattctatgagaaataatcttgctctgtcacctaggctgcagtgcagtggcacaagattatgactcactgtagcctcaagagatcctctcacctcaccctcccgagtagctgggactacaggcgtggcccatcacacctgactaaattcttttttagtgacggggtctcaacacgttgcctagtctggtctgaaacttctgggcgcaagctctctaatgtttttgcattcatagtctcccttattttaatttctcaagtttttgcaaaattgttacataactatccgcccttttcatagagcgctgtttcttgagccaggtcttctgtccatgcatgtcctcttgagagagtggatgtcagccagctaccctggctgagagggatggggataatacagggatgcaataaaggagacagtgataatttatatgatctgggaccccaggcctcacaccagaactgtctagtatacttttagcaaacaagtgccactgatctgagccttgttctgcccttccactttccactttattacacaagcaggagataggcaagggagaaggcaggatgatgaggagactaaattccagaaaagaaagggctgcgtgcagtaagcagacagttgcccccaaagtggtctgggctcccacttaccttagagacatgtgcaacacttgtgaatagttgttttacaattcttaaatcagtggacagactgtaagcatcccattggtgtcagttgccaggtgcccaatgcctgttctctgcagcaacctttgtggtcccatacctgggcgtgagttctgttcctgcagagtgccctgtgcattctggtgcttttgtgccctctcctctaacctataaactgacaactctaactctatattttcacttacaatttttctgaagcagtgatcttttgtcatcttgatcacactacaagtcgctcaccctgcaagtacttgtaaaaatgaaagtaatctccattccttctggaaggtgattgccatgtacacaacctactaggccaggaacattactgatggctgtcctgatgcatgtctctctcacccccatgtccaatcagtcaccaggctctccccaaaaccatgctccggtcactgactttggctgtttaatcacttctgacctaaggtcctcattgagtcataagtacctcttgagttaattttctgcctccagtttctctctactgctgtttatcttccaccctgctgccagagtcatcatcctcaaaaatgaaagctgctctcattgtttgcctgcctaataacatctcttccctccctgttgtctacaaaaagaaaaatccaaactccttcacttgttttacaaagaccctcatctgcttccaaaccaaattgctagtcttggctcttgtctctgtcttccacatcactgccacactgaataattctttactgcctctgttgttgcacgggttgttctttttgttttgtctccatccccttcccccagcaaagaatatttactctttactcttctgttgagacccatctcaaatactaccttttctagggaaaattaggccttctgttcctaataacttttacccccatctatcaagtctgtctgctgtaatttatctgttaacatgtttctcccacctcaagaatattttttccatcttctgtacctagcacaattgcatggttggtgctcactgactactacatgttgatttatttattttacttgtttgagaggtggagtcttgctctgttatccaggctggtgtgcagtgatacaatcttggctcactgcaggctctgcctcccggtttcaagcaattctcctgcctcagcctcccaagtagctccgattacaggcacccaccaccacgtccagctaatttttgtattttcagtagagacaggtttcaccacattggtcaggctggttttgaactcctgacctcaggtgagccgcctgccttggcctggcaaaatgctgggattacaggcataagacaccatgcctggacttgcatgctgatttccgatataaaaatgaaatttttgaagattttggagaataccatcatgtaaattggaagctaaggcctaactattactacacattcagcaaaggaagtgggtataaactaacaactttggcacatctgtcatgcagtagtttgctgcaaggtggaaaagattttggtgctttggtgggaaatactgttgaattacagaaattctaaaacaaaagctggctcagcttaaagagaaaagaaaatgcttgctaatgcctgcttgcactaaaagctgtcacactgtggcctttaataattctaaacatttttaatggattttggtttgaacttcaaattcaataggaaaaataaatgcacagataaaggacccagatcatttcagagctccaatgtgtgaacccgttttctctacttatttagagttttgtttcactagtggcatgagttaataggagtgttgctttgtacataaattctctttattccataattcttggttttaaaaattgaatgcaataccagaaacctacagggtataaatcttgcttgatgtgtgtgcaatgtacatacttgataataattgattatatatcatatttataaaaagaatcatgtgtactgttttaggagaacatactttaccctgatactttattgttaaaaacaacaaagcattgttctaactactaaaaatcaaaaatttaactttcttttaaaagaggtacatgtatcttcagaaataaaagggatacccagaagataaggtaggtgttctgaaacacgaggtgaaacatttgaatgggttttttttgtcaaacaataaatttttaacaaagaaaaagtttgcattatgggtgaagtatccttagtatctttatacaagatgaaatcctgattgattaaagatacgttactaactttaaatgtcttttaataagtgcttacatgctaactagtatttagactcatacctggcagatacatttagacataagattctaacttagtttcatttctgaggaggcttgtgtattttcctctgtgatacagaaaatagatttttttaagccattttatcttttactttagagttttaattgtttgttaagtggtttataatggtttaattaacaacccgaacaggttttctgtgatttggttggttaaatctatatgtatttggttaaaatattctacgtcaaagttttaaaccaagagtaacttaaaggagtcttaacttgtgtttctctgaatttgatttgtgtttaaattatgaaattaagttttcaaagaacgatttttgtgttcaaaagcttaaggtttcacaacttaattttcctaagtacaatttttttctatcggacttagcctccttttagaagacagttttttactaccaaatttaccattcccatttttttttttacttttacagatctgtatttagtccataaatatccaaatatctgcttgtgaaggttctgtctttaccaccaagcctaccggtatggcaaagacatacagttgctaatctcattaaagatagatcacaatgagagagactcatctagccatgaacaggtcacttctatcagtgttaactgctcaaagttaagtatgacaagaagctatgaagtaaagtttggcctttgtgtatgggagaggaatggaggatgccaggatgcaggtcaaggaaggcatcctgtggaagtaacatttgagctaatatctgaaggatgtgtgatagaaggaaaaagaatgcttcagagaacagctggtacaaaagccctgaggttgaaaaggtggatgtgtcagggaaatgggggaagtacagtgtctggaagaagaaaagacactgaatgaggtgaatgacaggaatgatgaagtagataggggctagagcagattgtaagaactctggaaagctttgaaaactgttgggccaaaaagtagtatgatgaaatttgcatgctaaggactatttttacccaagtagtaaatagaccaggtagaaggaaataatgattggccttctgtttggaagatcagttagaaggctagtttatgaaaactttgaaaagcagtgatggcctgcagcatcgtgacagtaaagatgggagctcaaatggatttgataaaggtttaagaggtaagagaggcttgctgattggatggtgtggggaagggatagataacttcctgatcttggattttatagctgggtggatggtggtgcctcattgagactggaatgctggattaagcaatgtatatgaacagggcatgttccctaccctttaaagagttatgtatatgttttccatgtttttagctatttctccacttgtaatgtgttttagttggttaaaaattatgtacctggcatggatgacgcattaaatgtacttatgtaactgataaaccaatgttacattcttgaaaataaattacattctatgaaaataaatggctttctcctattcttttccttctttcaattttttgatactaaaatgcaaagaaaagatttcttgtagatgacctgagcttttgaatgattttcagatgagatgtacacctaaatgttaagagtgttgaagtttgtatttgatttagtgatgctttatctgtttgacttggaagcataggattcatgagaagagacttcgggtaggaagcaagctaggactctcaggatggcttaagcccatcagagcagttctgatgctaattaggagcatcagaactcctttcaaggcctgatttttcaagtcatttcttaattgaaagcccatgaagaacataagtggtcttgtgatatgcttaatgtcttagagatgtatcaatattttgcttcagcagtaatctgtgaaaataaagtttatgtagtaaacggaagttgctgtttatctactggatgctaagatcttcactagctctgtcagtgccaaagaaaatgattcattttacccctttcacaaagagtgaaacttatttccacagagtatttgtctagccagcatttaaatacttctggtgatgacagactttctacctacccctaagcagtccttgagattgtactatattttttaatggcaaacaaagtactgtgtattttaatggcaaacaaaatagtgatgttgtctgctgagttggtacatgctagaagctggagtgcaggcaggctgtcctgtgctttatgcaactcagggagacagcatgcaatctgacccccagagagttccatcaaggcatgcctcaactactcagcgagtgaccatcttctaccttaagatttctgctcctgagaaaaaatatctgtctcacttggctgcacagccatcctcttccgtgtgaattaggccaccatcttctaagaccatctcacataaaagttttactgggactcgcggccaggcatggtggctcatgcctgtaatcccagcacttctggaggctgaggcggatcacctgatgtcaggagttcgagaccagctttgtcaacatggtgaaagctcgcctctactaaatatataaaaatcagccgggtgttggggcgggcgcctgtaatcccagctactcgggaggccgaggtgggagaatcactggaacctgggaggtggaggttgcagtgagccgagattgtgccactgcactccagccttggcagcagagccagacttcgtctcaaaagaaaaaaaaaaaaagaaagaaagtcttctaataccatctcacatgaaagtcttattgggatgctcattttgggtaatgcttgtctctgatgtcatccacatgactcaccagaatcggaggtgagccccactgtgctccaaagatggtcctctgttatggtattaatcctgacagatgtaacctgaacatccctttgggcccctggtagcactgattttcccattttggggagaatatgatttttcatctcttgcttgagcccatggataattctgcatcaccacaccataaatatcattaggatggacaccatgctttattccatttctatatgggataagagaaactgaatataaaggaataatactttaaaaagccctccctactcctcactttaaaaaattgaaatagcttggtgaagggatgctgggaagaatacttctaaagctaagcttaaatatggtttttgaaaagttaaatcttaaggtactctacaaataactcagagtttttgcctcactgtgacccaagcgtatgcatgcatttagaagtctaattacaagttagtcataaatatatcttaccagataattaccatgttgtgaatatccaaaattggaatcaatagtatgttcagaaacaatttgtggtgacaagtatatataaggcaacttttagataagccactcatagctacttattttggagagtgctggataatggtgaccatacatgctgtctgttgggtgatgtaagttttcctaaatatttgtgtatttgcactgttatagtgctgcttcctcaaggccctggtgtgttacattttctatgctttggggtatgggcatgtcttacatatggctgtcttctgtatatgttagaccttctattgtggtaagactaagtgaatgaaagttgaatatattttctgtgaagtccctgaggaaattaattaagttaataaagaaatacaagtttgaaatttgagtttacttcagagaagtaatttgagtttacttcagagaaattaaaaattatatctggtaatacaggccatgcgatgtgtcttagggttgtctgtaatatgcctattctttgcatgcccaaagccagtgtcatgttgctaagaatgtgagatcaggatatatgctgtaaaattactctttcttcaggaaagcggatgctgtgcctcagaatgagagtgtgtgtgtatgtttggtcttcttgtgacagtaagtgctgaaaacagggtagtcactcatcttctccgtttctcatggatttggctttttttaagcagctctagatgtagatgtggtgaacatggtggtctgtgtgttctgaagcttgctgtgcgcctttgttactctgttctgcactggagagtggatagtgtgtggtcatgtgtttgttttgtgttatgctaagagaaagggagaagtatcagtgtattggagaagtggagtggttaacactggtcaaattcttatgtttagagattattatttatttcattattatctttacagtaaatggagttttgtaagggctcatttgcccagcttgtctctaagaagtctgatagtagctagggctgtctctggtgtctcttcagaaaattaaataaacagaaatccagtcctaaccagaaactatgacatgcttctattacaaacaaatctgtctagagtacttttaaataagtttaacctacaatattcaagttgcagacaaactttggtgaaaaccatttcttagccaggtttgtttgtatttgcattaaatcatataaaccagaagttaaatctttctgtttctcttctacctgtgctagacctattattaatcgataggaatccagtctgtaagtcaataatcaaaagttgaactttaattttcaccctttgttggttgttagcttttttacatagaaacacactcaccatgatggcagtaagagcagaagtcataagatctaacaattactgaccactagctaccagcatcctaattttttttttaacacatcatctttttcattcattacatgacagagggatgtagatgtaattattatcctcaggattcacgtgagaaaacagagacccagggaggcagccagctattagaactcaaactgttaagtttgtctccagggctgtgcttctgacccctgccggactacctaccatagagacacgattcgttcaccaaacaaatactaactgaaaatctcctgtgtgcagagttctccctgttaggcacatcaagcgaaaagatgggcaccccaaggaaaaagtataagtgtgccaggacagggtcctgatttccagaaataaatcacagcttacctagtcaacacctcattttacctaatatttgacgacataagtgggaccttcccttctgtgatgatcaggaatggagattggtattctgtggactgaggggcttgcataggtcgtgttactacatgaactgactgacttggatttgtgtgcccttaaagaggggaggttcaacaagacactaaagcagaatactagcaggctgagacccagtgggaaagaagagtgaaaccctgaacaaagcctgtcaaggatcaaatttttaccatgttctcattgcaaaggataatgtgtgaaaaagaggtggtctttcacatggtgggaaatattccagaagtgaaaaagggtgggcatggactctgcgattctgctggtcctctgtgtggtggatcatgggggactctcttatcttttgaaaccttttttgtggacacccacttttaacctcactggaagtgctgagccctattcaaggacccatatgaaacctccttttgaagagatttcaaactgtacactcataagtgtttgggaaatttagttttgctttgggtaggcccaacgccttgagaacaggtctattggtttgttataataggttattgttactttacatattatagaaactcaaggttttgcctcagaatttgcattggggtgatcctaaaaagttcataacgtgatatgagccaagtaaaggcaacaattgaattggcttgactactcatctaatctaaagatttgtccaagctcaactgtgatagcctctgggaggtattatttctttgttgttttgctttttaagcaggaggagccacatgtactggaggacagtgagaggaagaccttctgtgttttgagtatgtttgagatggggtcaccagtgtgcctagattcttttatgagggtgcctgaacaagttatgaaattgggaaatcttgcattgtgataagcacttgagggtctgtttcctgtttcttcctatctgtggataaggactattttgaaactaggaataaatagagaaatgaagtcatgcatgctaccagctcaattttaactgacttgtcttctctatttactgctagtattattattatcattgttatatttctcatgacattgggagagtttcagcaaagcaatagtggaaagcaatgtggattagcagaccagcattctggctcctttcttttgtcatctgttgaatatcactttcagcaagcttggattgggaaccattttttgatgcccacacctggtaccaggctgcggaactataaagattgatataatatggttctagttctaaaattcaccagtgactcacaaacagcaagaacaagtggagaactggcaagtgaaaagttgcagtgcaaagaaaaggtgataccctcaaatgtacatgttttccatgtgtagaggaagagtgtgggaaagaagaaatgtaaatttaggcaaaaaagtagtttaagtacaggacttgaagtattaaaatataaggcttatttgaggacagggtaggacaagaagtagagtgtgacaagagaatatagtttggaagtgttgtgtagagttggcatgatgagagatactggccttaggaaaatggatgaggggctcagctgtgtaggctgttatgagccatcaaatgttttggagcagggctgtaatgtgagcagctctgtgtttcagagggaacactgctaacgttttagaaagtttaagcttgaaaaaagacaatgtgttcagcaacgtgcagtgcaaacttgtaatttggtaccctttttgatagaatacattttccctttttaaaaagagacttttcagcccagaatgtattggctgccttcctatacatggttaaataataatagaaggtgagaaacatttattttccacaaatcaaattcaattagacaatgtttaaacttccctaattgtatttactaattggtacttatttaaactccttagagagtagacaattttagaagggacggacttcttttctctcaaaaacattgaatatgaacactaggagctgaatggagatatatgtaaaataattttgaacaaatgattattataatggggttaccaaaagcttatacaaatcagtaaaaagttaaataattcagtagcaaaataagcagaagaccttactaggtaattcaaaagtagtacactaaacatatataaaaccaagttacctaaatagttactaaaatgcatattaaaataatgagacgccagtttttcacataccaaaaaagaatttttttaactggaattttttaaactttttatttattattctttaagttctagggtacatgtgcatagcgtggaggtttgttatagtcaggaacctcaggcttcaggtctgttggagtttgctggaggtccactccagactctgtttgcctgggtaccagtagaggctgcagagcaacagatattgcagaacagcaaatgttgctgcctgatccttcctctggaagcttcgtctcagaggggcacccggctgtatgagatgtcagttggcccctacagggagttgtctcccagttaggctactcgggggtcagggagccacttgaagaggcagtctgtctattctcagatctcaaactctgtgctgggagaaccactactctcttcaaagctgtcagacagggatgtttaagtctgcagaagtttctgctaccttttcttcagctatgccctgcccccagaggcacagtctacagaggcaggcaggcctccttgagctgcagtgggctccaaccaattcaaacttcccggctgctttgtttacctagtcaagcctcagcgatggtggacgcccctcccccaacctcgctgccaccttgcagtttgatctcggactgctgtgctagcagtgagcaaggctccatgggcatgggaccctccgtgccaggcacaggatataatctcctggtgtgccgtttgctaagaccgttggaaaagtgtagcattagggtgggagtgtcccaattttccaagtaccatctgtcacggcttcccttgcctaggaaagggaattccccgaccccttgcgctttctgggtgaggtgatgccctaccctgcttcagctcacactccatgggctgcacccactgtctaacaagtcacagtgagatgaacccagtacctcagttggaaatgcagaaatcacctgtcttctgcgtcactcatgctgggagccgtagactggagctgttcctattcggccatcttggaaccccggaaaatactttttaaaataacatgttccattaaactcttcataaatgataattgtagggaaacaagagctttctaacactgttaccggaagtacaatttgatgtcatatttgtatatggcaggttttacactgtgcatcagcagcctttaaaatgtgctacatttcttaatatagtaattttaactaatatattaattttaacataatgaagtggaatcacttgtttggggtgaatgcctgaggttcatcatctcataccaaggaaatcgagtacatggacacagaaaaacttggtttaggagcagaggtttaataggcaaaagaaagagaaaggagaatagctctctctcctgagaaagagtgggacttttagcttgcagagaagtgcactggattttacagactgccttcaggaggcagtgtctgatttacataggggccaaagattggctggatcaggtatggatgtttacacagcttaggaggaagctagctaatcttcaattatgcaaatggagcacttgccagcaccatgttgcctgttcgttactctacacgtggtttacaaagaaaagggaagatggagccaccattttgaacatgtgtcctttccaggtagctccttttcctattagcagagctgcaggcatttattcatgcaagcttccagctcgcttatctatgtctgcagctcaatcttacaggctgctctttgttaaaaagaaataatttgggggtttttattaaaaggaaaactttaccaaggactgtttttgccctcactcactatctgcctaaattatttatttatttattcatttttgtttttgttgagatggattctcgctgtcgcccaggctggagtgcagtggcgtgatctccgcccactgcaggctccgccccccaggttcatgccgttctcctgcttttaactcctgtatcaataatagttaatgtcatgggaaacatttataacgtatttgtatgtatgaataagcaagatagcaagttttaactagtggttgtgtttaatttatttatacaaatgtgttgggtgcaagtataatttagttacatgcatagattgcatagtggtgaagtcagggcttttatggtatccatcactcgaataatgtacattataactattaagtaatttctcaccatctaccccaccctaccttcttactctttcatgtcaggtgtgctggccctcaatgaccaacacaacaaagataaatttattgttttctgagacttagacttagacttagaattcaaaatcaacctaagagaaaagatgaccccgagccaataaaacatttgttttatatatatatgtatttataaacacacacatacacagacatgtatatatatgtgtgtgtgtatgtgtgtgtgtatatatatatatttgtttatactgaagaaactcatacagagtctttcccactgcacaaacccaaaagtaaagccacatggccctatgcaataaacattatggtaataacttcaaaaaaaaaaaaaaacttcctccaatgaatgtaaattcgaaaataaaatgaaacaactatttctccagatgtgcagaaatcaatataaagacacataaagacacaggaaacacagaaaagcaaggcttatgacactttcaaaggaacacaataattctccagtactctaagaaaaaaaaattcattgaaatggctttaaaatactttaaaaagacttcaaaatatagattttaaagaaactcaaagagaggcaagagaaatctgaaaaccagtacaaaaataaataaataaatttagagtccaaatgggaaatgttccaaggagatagatatcttttaatagaaactgaaacaaaaattatggaactgaagatttattgcaggcaaaagaaaatacattcaaagattcaataatagactggaagaaacataaaaataattttcaaacctttaaacaggtcttttaaaataatacactcagacaaaaataaggagaaaagaataaaaaagaatgaagactttgtttccaactacatgaagtaactaaactttaaaattatcagtgtttctgaggaagaaaaaacatcaaaaagtttagaaaacctatttaagaaaacaattgatgaaaactttccaactctagcaatagaattagacatacatacacaggaagctcagcaaacaaaatacaacaaaatataaacaaaatatattgcaaaacagacatcataatggcacatgataatcagaatatctaaagtcaaagtgaaggaagtaattctaaaataagcaaaagaaaagcatctagtaatttataaagaaaaccacattagattaaaagcagacttctcagcagaaactttactgaccagaagagaatgggatggcacttttagagtgttgaaaaaaaagaaaactgccagccaaaaattttatatcaagctagaataaccttcacaaatgaagaatataaagtcttaccctgacaaataaatgctggggaaactaattaccactagactgggcctatgaaagatgttaaaaaaaattctaatataaaaacaagagattgatattcaccattattaaaatatataaaagtataaaactaacaggtcttacaaaacaaaacaaagtgaaataaatcaaatcacaacatgacagaattttattaaactacaaagacagataaaaaaataagacaagaaaataattaacattatgatagtaacaaaaccttacatattaatatttaccttgaatataaataaattaaatccttcattgaaatgtatagatttggttgggtgcggtggctcacgcctgtagtcccagcactttgggagggtgaggtgagggtatcacgaggtcaagagatcaagaccagcctggtgaatatgatgaaaccccgtctcttctgaaaatacaaaaattagctgagcgtggtggtgtgtgcctgtagtcccagctactcaggaggctgagacaggagaatcacttcaataggggaggcagaggttgcagtgagcagtgggacgagatcgcgccactgcactccagcctggcgatggagcaagactccgtctcaaaaaaaaaaaaaaagtatagatttatgaaatgaatgagaaaaaataacgcaaatctatgttgcctacaaaaatctcaccttacttgtaagacacatatagattaaaggcaaatgggggggaatatattaacacaaacagaaaccaaaagtaaataggagtatctatacttacatcaaataaaacagactttaaattaaaaagctgtaacaaaaaaggataaagatcatcatccaataataaagaaatcatttcagccaaaagatataacaattctaaatatatatgaacccaacatcacagcaccctgatttacaaagaaatattattaaatctatagaacgagatagacagtaatacaataatagtggagaaattcaacattctactcacagcattagagagaccattgagataggaaatctggcaaatcaacaaagtatccccccaaatcaaaattatacgaactacctacttagaccacagtagaataaaactacaaatcagtatcaagagaaatttcagaaactataaatttacaaagaatttaaataacatactcctcaacagtgactatgtaaatgaagtaattatgatggttgaccaggggtggtggctcccacctgtaatcccagcactttgggaggctgagacaggtggaccacctgaggtaagaagtttaacactagcctgggcaacatggcaaaaccctgtccctacaaaaaaaaatatgaaaaaatagctaggtgtggtggtgtgcacctatggtcctagctactcgggaggctaatataaaacgatcgtttgagcctggaaggcagaagttgcagtgagccaacactgtgccactacactccagcctgggtgacagtgtaaaacctatctcaaaaaaaaaaaaaaaaaattaagatgaaaattaaaaatttgtgggaaaaaagatggaaatagaaacacaatataataaaacctgtgagatacatcaaatgtagtactaaaagggaagttaatagcctaaaggcctgcatcaaaaaaatagaaagcttacatattaaggacctgacatcacatttcaaagaactagaaaattaataacaaatcaaatcccaagttagaagaggaaataaataaaaatcagaacacaaccaaatgacatgaagtccaaaaacaataaaaatgaccaacagaataaagagttggtttttcaaaaagacaaaattggtaaattgctagctagattaaccacaaatagaatagaaatctaaataaacaaatcagatataaaagaacagacattacaatggatacaacagtaatacagaagatcactagaaacgattataaacaactagacactcacaaacctgaaaacctagaaagaatgaataaatccatggaaacaaacaacctcccaagatagagtcgggaagaaatagagtacctgaacaaaccaatactgagtagcatgattgagtcagcaataaaaaaaaatgtcttgacaaagaaaagctcaggactaaatgcacagcaaaattctaccaagtgtacaaacaataataatcctcctgaaactcttaccaaaaattgaggataataaaactcttcctaagtcactcagaggtcagtatcaccctgataccaaaactagccaaggacacaacaaagaaaactattattaaattattatttattatattattattataaaaaatagacaaatggaaatcaaactaaaagttttggcacagaaaaaaaaatcagcagggtaaatatgcaagctacagaataaaagaaaatatttgcaaactacgtgccaacatggaactaatattcagtacttacaaataactcaaacaactcaaaaatataataatagtaataataaagaattctattgacaattgagcaaataacattactaatcatttttcaataaagacatacaaatagccaacacgcatatgaaaaaaatgctcaatctcaactaaaaataaaactgccatttttttttttttttttgagacggagtcttagttgtccaggctggagtgcagtggtacgatctcagctcactgcaaccactgactcccaggttcaagcaattcttctgtgtcagcctcctgaggagttggggctgcaggcaagtgccaccacgcctggctaacttttgtatttttagtagagacggggtttcaccatatcgctcaggctggtctcaaacttctgacctcatgacctgcccgcctctacctcccaaagtgttgggattacaggcgtgagctaccacgcctggccagaactatcatttgattcagaaatctcatcattgggtatctacccaaagaaaaatagtttattatatgaaaatgatacgtatacttgcacatttattgcagcatgctcacaacagcaaactgtatatatcagaaaagcttaatattcaaaatatatagaaaattcaaagcaaaagcaagtataataataacaataataatccaactaaaaaatggttgaaagagtgaaaaaaatattttgccaacaaatatatacaaatgaccaatagatatataaaaaagtgctcaatatcacctaccaaaaggcaactgcaaatgaaaacaatgatgagctatcactcgaaatctgttaggattgctaatattaaaaaaaaatagagaagtaacatctgtcattcatgttcctgtgatttctgaaacaaatcttaatatcaccactcctcttacacatttcagacatgatgggaaaagaaacgttaaatgatctaacatgcagttcctctaaaatactcagaaatattcttatactcccccaaaacaatggaagagcaggcatatcatgcagcaccttataagccataaagaggactttagctctcacggtaccctctaaggaaaatcactaaataggaagtaggatccttaaagaatttaagggtatgggacaaaagatgctcctatttgggagctagagaaataaatggctttttaggaaacctttccatggaagcagagcattctataccacattttaaggtctgaaattctttctgaccttcgtatccctcgtctctgttatctgcttcattcatgcttacctacctgagaagctgactactgtctcatgtctcttcacattccagggctcttttatttgctcaaagcaggatatcagatcagagttagagacagcaaggcctgttttgttagaaaaattagcatgactttctgggatcctccagttaccaacctagtactatgttcagtagagaggagagaatattatgaaagattctagaaatttaattccaaaatactgttttctgacagaaacttttgaatatttaaaacatacgtgacatttctgggtccttagctctactatccaatactgaatataaaattagtgctggatattggattttaatatttgtgcaacagtatttaatgccactgaatttctagaattatcattaatctagagtgaaggatacagattagctcaagagaggggaaggttcctattaagataaaacatcttgaagattttcttatctattccaataaaccttcaagtttttcttaaaagtactgatctaaaaataatttatgcagagcaaaacctcccaaaatcattctacaaagggagaaaatagaagcctgatggtatattagaaaatctggggtatatttattctcaccgagagaccaggtttctatagttctctaacattgcatctctacacaaatttcactgagcaggattcagacattcccactcctcttgagagaattctatggccaaagccttgaatgttaacatttcctaaacaaacccaaacacccacacatatttagcaaatggccatgggcagaattgttaattttactctaggtgtttgagagttacagagactggaattatccaataaaatattgttaaatagagaaagattctgtaatatatttttgcattctgaggaaagaaaatgaaaaaagatccacaaaaccactgtaggtactgtagttttctgaataatacagcataaaatttatggcataaacacaagcatatacagttttgagtgccatatttacattatacacagtaagttctgtccagttctcatatggagaagtcacagtaagttagaaggtacctctccaattttaacgtatatatcaatgagctgcagattttgttaaaatatggattccaattcaagagatctgagatgagacctgagttactgcattgctaacaaactcaccaatgacataaatgattctaacttaaggaaaatagtttgtaaaacatctagtgatagaacctgggttttgtccccatgtatatgaccagtgaacaaagatgacagccttcattttccaaagcaagatataaacaagagaaactattaagataagggatgtaagaaaaatggatgtgctgtggtcaataataagctgaggtaaacatctggttcagcatgactcagtgagtttgagtgcaggtgcacaattctgctcattatgtaacctagttctgtaagctcatacttggctttgagccactatcgtgtgtaaggagtacacagacaggtagacaggaggggaagagagagagtaaagccgctgaccctgcacacatggctcatgcccaggcttctgcccagagagataataaagccatatcaaaactgcccacaattcctcgagtgtttttccagcaacccaccactcgcccactgacttctatcagacctcagcttgggctggaacctgacacttagcatgacaggggagctttcagattaaatgtgattgtttctgcacattagtcagaaagtctctcgaaaatacctgttaataatacagtttttagaaagtaattttaaagtgaagaattccttcaggaaacatgctaaccaagtgaataaaatggacagattggcatcaggtgcggatgcatatatgaggatgcaacatgacttctgtgagattactggccaaaaatcataaattattattatttatttatttgttttgagatggagtctcgttctgtcacccaggctggagtgcagtggcgtgatcttggcttactgcaagctccacctctcgggttcacgccattgttctacctcagcctcccgagtagctgggactactggcgcccgtcaccatgcctggctaattttttatatttttattagagacgaggtttcaccgtgttagccaggatggtctcgatctcctgacctcatgatccgcccgcctcggcctcccaaattgctgggattacagaggtgagccaccgcgcccggcaaaaaacataaattataatctgaatctaatcatgaaaaacatgttttatgcaaagttcaagccacatatgatgcccatgttttgtaatttctagcagtctatttaaatactgtctctttagcattctagaagacacatttctttgaattaattcctttacatacacatctttctaaattattccaggctattaattccatcctttttcagtggggattttaaaattatgttcttcagagagctgatgaagcattcagatggaacctaaacggtgcacttttctccctcactgatatctgaggacccagcagcaaccccaataagaatgttttatatccctgaaagattctcccgaaaacttaagggaatgaataactcctccttccacaggcctagtccaaaggcacaaagccccttgcaccagcagcgtgcgtcagcaagagagcggaagcaggaacagttggcaggaagacacataccccctgaagatccagagggaggccatctgggtacagcagctggacaaaagaagctcctcagcctccagtcgcctgtctgtgcatgcccctcggtcactgatctcacctaccagtaagtatcctgggagcccagttaacagggaaaaatccacacagcctctcttgctctctccagtccaaaaatccaatgttggcccaagaaggctctggcatgtgccaggcacttgctgatcttttggtcttagggggatgcctctaagccatttgatcccgttctaggaacaaaaaaggcagtggtgacaatcgctccttttatcatctccctccagcttcccaggatggtccccttttccctgttctctctagcctaacctcggttatgggaaatctcaagttttccattccaaaggacatccttctaggctgcctcataaaaaaacctacaaacctcaggcctcagtcaagatatccgtgccttgtcttgttttacaattcaatctggccacaatacgaattggataatgggtccaaatggcccacaaacggaacattggactttacaattttaactgacttaatcaattattgctgatgactggaaaaatgaggagaaattacttatatccaggccttttttgcactcagatcacaacccaacctctgcaattcttgctcatgtgttcaaatcctcctcctctgttctcaccacccagattgccttcctcttcccgaccctacctctttttcctctttggatccagcagactgctgtccaccctcccagcccctacctctccctctcaaccatcttctttcacccccaagccttttctttatcttctcagccacaatcttctcagtcaccatcttctcagcagcaatattcccagccaccatcttcccagtcagcagtatccacttcttttcctatatcgtcccctcctcaggacaattctagtattgcctgtacccactgacctcccccaccgccctctcctgaggcttgtaaacccatcccgccactttacactcctatctatcctccactgcctgttaactcaacccccctcccctgttcaaaccctcagcaggaaccacttccaggttcctccttctctcccatccacacttgctcaggcgccacctttagcccatgccccactcttacttcagcggctgtgctacagtgcccccttcaggaagtggcagaaactgaacatgttgttagagttcacattcccttctccctcactgatatctctcaaattaacaaaaagactcagttcatttccagaagaccctacctcttatattagagtttcagtacctcacccagtgttatgaactaacttggcatgacctctacattatcctctctgccaccctctccccagaagacgaggaccgtatctagaccccagctcaggtgcatgccaatacaattcatcaccaggctcctgcccagcctactggtgcacaggcagttcccaaccaggaccccactgagattatcaagatgtggtccctggatgccaccatcgagacaacatgattgtgtgtctccttgcaggactcaaaaagggtgcccataaagcggtaaactatgaaaaactttcagaaatcacccaaggtcataacaaaaacccagccctttttctctcttgtttaactgacgccatgagaaagtataccaacgtagacccagctatcccagaaggaaccactaaacctttctccctctataccgatgaatggtgtggagttgcagtaggtgttctaacctagtataagggacccaccctccaggtttttgcctacctctctaaactgcttgaagccacagttctcagatggcctgtctgcctctgaacattgacggcagctgctgtccttgcccttgaaagcctaaactatctctccatgccaacttaacagtttattcaatccataacgtcaaagaaagacatgctagctcaccgcagtttcctctctcccccacggctcctccaactgtatgctctattcatagaagctccgcacatcaccatggtaaccagctcccatctaaacttggccacgccaaagatcctacatacttctgtatcaacactgttcaaacctttcttataccttttccaaacctaacagaccaaccccttccagatgcctctttacttggtttgtagatggcagctccttcctacatcaaggatgccggcatgctggctatgctatagtgtcaccccccctacacactgttcaagccaatatgctcttcctaggcaccacctcccaaaaagctgaactcatcaccctcattcgagctctcactctagcagccagtcaacagatcaacatatatttaaattctcattatgcgttccacatagtgcattcacactcgtccatctggaaagaatggagtttcctaactgcaaaaaaacactcctgtcataaatgactctatcagcaagctccttcaagctgccagactcctgcagaaagctaccgtcattcattgcagggaccatcaaaccccagacaatcctattttggtgggaaatctagcagatagagaagccaaacaagtagccctacaacctgtacaaggccagtttctgtgcctgtcctcgttctctcctctttactctccagaagaaaaggaggactaccaagcccaaaaccttcaaaaacaaggaccatggtatgtcaaggaagggtgcttccttcttcctcactctcaaacaatctctatcctccaaagcctccacaactctttccatgtcaattacaaacctctcctgcaacttctccaccctatcctcacttgtcttcacctttccagccgtgtttgagagattacccagtcctgctctatctgccactcagtatcaccccacagttccctttggccactgccttttcctacccactaagcccagggccaggtacccaggcaagattttcaagtagacttcactcacatgccacccaataatggctctgctatcttctagtctttgtccgtactttctctgggtgagcagaagcattcccaacaacttcagaaagtgcaaatgtcatcacacaaactctcaacatgcatataattcccaattttggactgccaacatccatccagtccaataatgggcctgccttcctcagacaaattacccaaggcatctctatatccttaggtataaaatgggttctccacacaccctacaggcctcaatcttcaggcaaagttgaaaaaaattacctctcttgttaaactcaccaagttggctctagtaaccctccagtggtggacaaaaaaatctccctttttccctcatgagattctgtgcaacaccaaaggcacactctttttatagtccctttgaaatcatgtatggctgaatgttgcgggaagtcagggaccctgaacggagggaccagctgaagccgtggcagaagaacattaattgtgaagatttcatggacatttattagttcccaaaattaatacttttataatttcttacacctgtctttactgcaatctctgaacataaattgtgaagatttcatggacatttatcacttccccaatcaatactcttataatttcctatgcctgtctttactttaatctcttaatcccatcatctttgtaagctgaggatgtatgttgcctcaggaccctgtgatgattgagttaactgtacaaattgtttgtaaaacatgtgtgtttgaacagtatgaaatctgattgtaaaacgtaggtgtttgagcaatatgaaatcagggcaccctgaaaaagaacagaataagcgattttcagggaacaaggaaagataaccataaggtctgactgccttatggttatctctattctgcagtctgactgcagaatacagccatatttttcttctcacagacagcctatggatggacgtgtgagtaggataaatatcactgaattcttttcccagcaaggaatattaataattaataaccctggggaaggaatgcattcccaggggtaggcctacagatgactgttctgggagtgtctgtcttatgcggttgagagaagggatgaaatacaccctggtctcctgcagtgtcttcaggcttgctaggattgggaaattccagcctagtgaattctagtcagaccagttctctgctcttgaaccctgtttcctgttaaaatgtttatcaagacaatgtgtgcctagcgggacatggacactcattggtaattctaattttgcccttgccttgtgatcctgctctacccttttgccttgtgatcttttattgccctttgaagcatgtgacctctgtgactcactcccaattcgtacgcccctccccttttgaaatccctaataaaaacttgttggttttgtggcttggggtcgccatcatggtcctaccaatatgtgatggcatccctggaggcccagctgtaaaatttctctctttatactctttccctttatttctcagaccagccgacacttagggaaaacagaaaataacctacattgaaatattgggggctggttcccccgatagccaaacttttgtcttggggcctctacccttcccagattctgagccattcaggaattacctcccctccttaatccagacatggtctttcattcgtgaagcggcaaatgaggccatgccccttcctgtcaacacctccttgtcctctcaacataactgtcttgcaggcacagatgtgtttatctgccaacccgagcctcacaaaaacctacaactgaagtggacaggcccctacactgtgatacgcagcatgccaactgcagtgagagtccaaggactcctcaactggattcatcgcactagggtcaagctcacccccaaggctactccttcctccaaaacattaacgtgggcaacactctcggagtacctgtatgtaataataatttaaaacaaacaaacaaacaaaaacaaccatgatccataaaggcaggaggaagccaaagatggcaacaggatgaatggcctccgcaacggatcatcgaatattaacagtcctgccacttggactgaggatagttcatggggttattgcactcccatatatactctaaatataataattagactacagggggttctagagataatcactaaccaaaccgcctcagccttggaaatgctcacgcaacaagaaaaccaaatgcgtgcagcaatttatcaaaacaggctagcactagactacttattagcagaaaaaggtggggtctgtggtcagtttaatatctccaattgttgtcttaacatagacgataacagaaaagcagtactagaaatcacttcaaacatcagaagagaagcccatgtgccagtccaaacctggaaggggtggggcccaacaaatctttaaggagggtggttctctaatttagggggatttaaaatgctggtaggaccagtaatcttcatcactgggttcctcctgtttctctcctgtgttatcccactaataataaaagccattaaaactcttattgaaactaaagttagctgccagacaatccagaccatgctcctgctacaatgacacgatggataccaacccgtctctcaagaataccccaaaaattaagtttttattttgcgaaggtgcccatgccacccctatgtcatgcctgaagtagttattgagaaagttgtcccttttttctataaccaaatagacaggaatgaaagattctccctggggtctgaacgcttaagggaatgaataacttctccctcctcaggcccagttccaaggtgcaaggccacttgtccaagtagcgtgcatcagcaagatagcagaagcaggaagagatatggccaggagacacattccacctgaagactgagagggaggctgtccggtaccatgtaacagttgcgtcagactgggacacttcctttttacagaggactataaaacccctgccctgtccttacttggggctgatgccatttcaggcctcagcccgcctgcaccgagatgctcattaaaacagtgtgttgctccacattgcctcatcttgtctgttggcacgctctcagggttcgaaccaatataagagccttgcaatccgcacctgcccaagctgatctgtcaacaaagaaaatactttcatgccgggcacggtggctcatgcctgtaatcccagccctttgggaggccgaggtggacggatcacctgaggtcaggagtttgagaccagcctggccaacatggtgaaacctcatctctacaaaaacacaaaaattagctgggcatgatggcgcatgcctgtaatcccagctacttggaggctgaggcaggagaattgcttgaaccctagaggaagaggttacagtgagccaagatcacaccactgcactccagctggggagacagagcaagactcaaccacagaaaaagaaaaaaaaaaaaaagaaagaaaagaaaagaaaaatgctttcaatacttcagggtataaattcaagtgagtattatttgtgatatgtaagaaggctggatggagagagttaaggctctgataaatcggggagaattattttaaagagatcctttcactgtcatgagaagaaaagggaaaaggtagttaaaataatcttgttaggcaaaagcatcagaagtagaaatgtaaatgattgcaattctaaatacatgacattgtagaagaaaatgtgaacagttttgacctgggacacacttatctaagaatcaaccattttttctctcttctctaattctttctcaggtgagattatctgaacaaatcaccaccttcatcttgagaatgtatcttcaaaggcattaggatagaccctctgaaggaaatagaccgctcctgcaggacccgggagacaccctaaatactgtgagtgccccaactgcagaaatgggaaagggagaccctcctctcctgaacacacacccccatacagggtggaggaggcagtagggaggccctgggagctcgctgaatcccgaagcagcccattcctgctggataccacaggaatccatcaggagggaggacagaggagcagggtgtaaaacactgaagggagaaggacttccctagctcaactttgcaagaatttgaatgaggcaagaagcctcctggccagaacccaggggaaggcgagaacctggcttgcagacttcacaggcagggaaaaactaaagccctgttctttcccagctgggaggcaggaagccttaagaaattttcaagcccaacttgccctccacctggaaacagactcggggctgttgtgggggcaaagtgaaagtgagacccgctctttggtttgcatgggagctgagtgaggcttatgactgccggctttcccccacttccctgacatcctgtatgactcagcagagacagccataatcttcctaggtacaaaactttagtgacctgggaatctcacccccatcccccatagcagccgcagcaagacctgcccaagaagagtctgaactcagacacatctagcacctcccgcacccaatgattcttccctacccaacctggtagtggtagacaaagaacatataatcttgggagtcacaccactgcactccagtcttggagacagagcaagactctgtctcaagaaaccacacaaaacaccaaactatgcaggcaacaaagagcatgatgaatgcaatggtaccacacatttcaatattaacattgaatgtaaatggcctaaatactccaattaaaggacacagaactgcagaatgaataagaactcaccaatcaactatctgctgtcttcaggagactcagctaatacataaggacccaaataaacttaaaggggtggaaaaaggcatttcatgcaaatggacacccaaagcaagcaggggtagctattcttataccagacaaaaccaactttaaagcaacagtgattaaaagagacaaaaagggacattatgtaatggtaaatggcctggtccaacagaaaaacatcacaatcctaaacatatatgcacctaacactggagctcccaaatttataaaacagttactaatagacctaagaaacaagatagacagcaacactgtaatagtggcaaacttcaatactccactgacagcactagacaggtcatcaagacagaaagacaacaaagaaacaatggatttaaactataccctggaacaaatggacttaacagatattagaaaacatttcatccaacaaccgcagaacacacattctactcaacagtgcatggaactttctccaagatagatcatatgataggccataaaataagcctcaataaatttaagaaaattgaaattatatcaagcactctctcagaccacagtggaataaaactggaaatcaactcccaaaggaacgttcaaaaccatgcaaattcatggaaattaaataatctgctcctgaatgagcactggggcaaaaacaaaatcaatatagaaataaaaaaattcttcaaactgagtgacaataatgacacaacctatcaaaacctctgggatacagctaaggtgatgaagaggaaacttcacagccctaaatgcctacatcaaaaggtctgaaagcaaaaacggaaaatctaaggtcacaactcaaggaactagagaaacaagaacaaaccaaaccgaaacccaacagaaaaaaaggaaataaccaagatcagagcagaactaaataaaattcaaacaaaaaaatacaaaagtaaatgaaacaaaaagtgcttatttgaaaagataaataaaactgatagaccattagcaagattaaccaagaagagagaaaatccaaataacctcactgagaaatgaaacaggagatataataactgacaccactgaaatacaaagaatcattcaagactactatgaacacctttacacacataaactagaaaacctagaagagatgaataaattcctggaaagatacaaccctcctagcttaaatcaggaggcattagataccctgaacagaccaaaaacaagcagtgagattaaaatggtaatttaaaaattaccaacaaaaaaagtccaggaccagatggattcacagcagaattctaccagatattcaaagaattactaccaattcttttgacactattccacaagacagagaaaggaggaaccctccctaattcattctatgaggtcagcatcaccctaataccaaaaccaggaaaagacacgaccaaagaagaaaactacagaccaatatccttgataaacattgatgctaatatccttaacaaaatactagctaacaatatccaaaaacatgtcgaaaagaatatccaacaacatgtcgaaaagataatccaccatgatcaagctgatttcataccaggtatgcagggatggtttaacacacacaagtcaagaaatgtgatacaccacataaatagaattgaaaacaaaaatcacatgatcatctgaatagatgcagaaaaaaaaattgacaatatttagcatccctttatgattaaacctctcagcaaagttggcatacaagggacacagcttaatgtaataaataaaagctatctatgacaagcccacagccaacataatactgaatagaaaaaagttgaaagcatttcctttgagaacgggaacaagacaaggatgcccactctcactactcctcttcaacatagccctggaagtcctagccagagcaatcagacaagagaaagaaatgaagggcatccaaatcagtaaacaggaagtcatactgtccgcttgctgatgatgtgatcatttaccttgaaaaccctcaggactcctccagaaagctcctagaactgataaaacaattcagcaaagtttcaggatacgagattaatgtacacaactcagtagctcttctaataaccaacagcaaccaaatggagaattaaatcaagaactcaacctcttttacaatagcgggaaaaaaattatatgaatatacctaacgaaggagtcgaaagacctgtacaaggaaaactacaaaacactgctgaaacaaatcatagacaacacaaagacatggaaacacatcccatgcacaagcatgggtagaataatttgtgaaaatgaccatactgccaaaagcaatctataaattcaacacaatccccatcaaaaaaccaccgtcattcttcacagagttagaaaaaacaattctaaaattcatatagaaccaaaaaagagcctgcacagccaaagcaagactaagcaaaaagaacaaatctggaggcaccatactacctgatttcaaactatactgtaaggccatggtcaccaaaacagcatggtgctggtataaaaataggcacatagaccaatggaacagagaacccagaaataaacccaaataattacagccaagcaatcttcaaaaaagcaaacaaaaacataaagtggggaagtataccctttcaacaaatggttctgggataattggctagccacatgtagaatgaaactggatcctcatctctcaccttataaaagaaaccaactcaagatggattaaggacttaaacctaagatcagaaactataaaaattctggaagataaaattggaaaaaaacccttctaggcattggctaggcaaaaatttcatgaccaaaaacccaaaagcaaatgcaataaaaacaaagataaatagctgggacctagttaaactaaagagtttttgcatggcaaaaggaacagtcagcagagtaaacagacaactcacacagtgggagaaaatcttcacaatctatacatctgacaatggattagtatccagaatctacaacaaactcaatctatacctccgacaaaagattaatatccagaatctacaacaaactcaagcaaatcagtaaggaaaaaaacaatcgcatcaaaaagtgggctaaggacatgaatagaaaattctcaaaagaagatatacaaatggccaacaaacatataaaaaatggttaccatcactaatgatcaaagaaatgcaaatcaaacccacaatgcgataccaccttattcctgcaagaatagccataatcaaaagatcaaacaactagatgttggcatggatgtggcaatcagggaacacatctatactgctggtgagaatgtaaactgatagagccaccatggaaaacatataaatgcatatggaaaacagtgtggagagtctgtaaagaactaaaagtagaactagcatttgatccagcaatcccactactgagtatctacccagagaaaaagaaatgattatttgaaaaacgtacttgcagatgcatgtttctagcagcacaattcacaattgtaaaatcgtggaaccaactgaaatgcccaggaattaacgcgtgggtaaagaatctgtgaaatatatatatgtgtgtgtatatatatataaatatataaacacttaaaatgtatatatacacacacatgcacacacacatacatatatatatgttggaatactactcagtaacaaaaaggaatgaattaacagcatttgcaatgtcctggatgagattggagactattattctaagaatggtaaaccaaatatcgtatgttctcactgatatgtgggaggtatgctatgaggatgcaaagacataagaataatacaatggactttgggtacttgcggggaagagtgaaaggggaagggataaaatacagcatatatggtgcagtgtatactgcttgggtgatggatgcaccaggatctcacaaatcaccactaaagaacttactcaactaaccaaataccacctgtacataagtaacttatggaacaataaaattttaaaaaagtatttttataattacagacaggctcacataatgaattcttcataaactattacacaggccagccgggcctggtacctcatgcctgtaatcccagcactttgggaggccgaggtgagtggatcacctgaggtcaagagttggagaccagtttgaccaacatggtgaaaccctgtctctactaaaaatacaaaaattagtccaggcgaggcggctcacgcctgtaatccagcactttgggaggcagagacgggtggatcacgaggtcaggaatttgagaccagcctgaccaaaacggtgaaaccccgtctctactaaaaatacaaaaatgagccgggcgtggtgatgcatgcctgtaatctcagctactcaggaggctgaggcaggagaactgcttgaacctgaaaggcggaggttgcagtgagcccagattgcaccattgcactccagcccgggagaaagattaagactctgtctcaaaaacaaacaaacaacaacaacaacaaacaattaagcaaacaaaaaacctattaaacaacaacaacaaaaaattatgggtctagcatgagtaccagtcaagttaaaacagaatttgcatggggagactctgaaccataagccaaaagattgtacagcaagaaattcaatacaaagcagagtataaatttgctttcagcatttttgagaatttttgttttgtagtaaattagacacctccttaaaatgattttgttccaatattgcttttttctgctaaaaatagtttcgaacttaaacacactccataatttatttacacctaagattcatcttagactaacagatgtgtatatttaactctatgtaaatcaatactaacagtccatatgtgcttgcaggcagaggccacatgttcgaagaaaaatatatgaaaaaattaaaaaagatttattcgggactcagaaatatatggattttacttatgtttgtatataagttttattatgaccataaaaataatcctgtagtcaacaacaatttaattgtacatttaaaaataactaaaactgtagaattgaattatttgtaatacaaagaataaatgctagaggtaatggagaccgcatttagtctaatgcgattgttatatattgtgtgtccgtatcaaaatatgccacatatggcataatatgtacacatattaggtatccacaaaaattaagtcaaatacatttaaatgagaaaataaaaataaaaatttagcctatgggaacaatattctttaacttaatggcaattaaaactcactggcaaaaaaaatcactagagatgtcagtccattatcttaccaaatagtgtatttttaccatcttttacctacacccttgagtaaggtggaataggttaaagttactggcataataacacttcattgaattcatgatagtatttaacatgttaaaactgtttggttgaaaagttcacatgcaatttataatttaaaaatatgctacatatatttcataaaaatacaataaatcatactaaactttaactaaaattaagaatgtttttctttcataataatgcagaatattaatctgaacatctacctcatgcatcactcgatattataagttaaccataaagatcctctctacttaaattttcatcatgcatcttacatttttaatgtccttacctttccatagaaaaggtcataaataatgcctcttcatatttgtaatgctttttcaaaatactcttctgtactttaaagacatattttctgatcagtcgtttgacagtaattacacttcttatttagtatgaacgctctgaatttgagtacgatgtgagcaggtattaatggctttttgtctatatttgttcactttttctcaagcataaatgctttcctatgcattaaggtgtgagcattagttcaaagcttggccacattgttcacactggtagttttctccagtatgaattatcttacctacgatcaagtgtgacaatcatttagaggctttgtcacattcttcacatttctaggatttctcagcagcatgattttcttgatgtttagaaaagtttgacttgtcaaaagcgttggcacatctttcaggtttgtagagtttctctccagtatgaataatattatgtctgttaagaattcaggactttttatagactttaccacattattcacacttgtaagatttctctccaatatgagttatcttatctgtagtaaggtgtgaaaactggttaaaggctttgccaaatttttcctgtttgtagggttgctgtccagtatgaattttcttatgtctggttagggctgaggaccagaaaaaggatttgccacattcttcacatttgtagagttttactccagtatgaattaccttatgtttagtaaaggttgaagaccggttaaaagatttgccacattctttatatttgtagggtttctctctagtatgaattttcttttttttttttttgagacggagtctcgctctgtcgcccaggcttgagtgcagtggcgtgatctcggctcactgcaagctccgcctcccgggttcacgccattctcctgcctcagcctctcgcatagctgggactacaggcgcccgccaccacgcccggctaattttttgtattttttagtagagaaggggtttcactgtgttagccaggatggtctccatctcctgacctcgtgatccgcccgcctcggcctcccaaagtagtgggattacaggtgtgatagtatgaattttcttatggttagtaaggattgaagactggttaaaggctttgccacatttttcacatttgtagggtttctctccagtgtgaattatcttatgtttagtaagagctgaggactctttaaaggctttgccacattctccacatttgtagggtttctctccggtgtgcaacctcttatgtctagttagggttgaagattggctaaatgctttgccacattcttcacatttgtagggtttctctctagtatgaattctcttatgtccatttagggttgaggatgatataaatgctttgccacattcttcacacttgtaaggtttctctccagtatgaattatcttatgtgtagtaagctttgaggatcgattaaaagctttgccacattcttcacatttgtatggtttctctccagtgtgcatcctcgtatgtctagttagggttgaggattggctaaatgctttgccacattcttcacatttgtagggtttctctccagtatgaattatcttatgttcagtaagagttgaagatttcctaaaagctttgccacattcttcacatttgtagggtttctctccagtatgaattatcttatgtgtagtaagggttgaggattggctaaaagctttgccacattcttcacatttgtagggtttctctccagtgtgcatcctcttatgtgtagtaaggtgtgaaggctggctaaatgctttgccacattcttcacatttgtaggttttctctctggtatgaattctcttatgttcagtaagggttgaggaccagataaatgctttgtcacattcttcactcttggaaggtttctctttagtatgaattatcttatgtgtcgtaagatttgaagattgattaaaagctttgccacattcctcacatttgtagagtttctctccagcatgtattattttatgtttagcaagggctgaggagtgcttaaaagctttgccacattctttacatttgtagggtttctctccagtatgaattgtcttatgcttagtaagggttgaggaacggctaaaagctttgccacattcttcacatttgtagggcttctctccagtgtgtatcctcttatgtctagttagggttgaagaccatataaatgctttgccacattctttacatttgaagggtttctctctagtatgaattcttttatgtttagtaaggcttgaggaccagttaaatgctttgccacattcttcacacttgtaaggtttctctccagtatgaataaacttatgtatagtaagatttgaagatcgattaaaagctttgccacattcttcacatttgtagagtttctctccagcatgtattattttatgtttagtaagggttgagagtcgcttaaaagttttgtcacattctttacatttgtagggtttctcttcagtatgagttatcttatgattagcaagggttgaggaattgctaaaagctttgccacattctttacatttgtagggtttctctccagtatgaattctcttatgtttagcaagggctgaagaatggctaaaagctttgccacattcttcacatttgtagggtttctctccagtgtgtatcctcttatgtcttcttagggttgaggaccatagaaatgctttgccacattcttcacacttgtaagacttctctccagtatgaattatcttatgtgtagaaagacttgaggaatgattaaaagctttgccacattcttcacatttgtagagtttctttccagcatgaattattttatgtgtagtaagggttgagaattgcttaaaagctttgccacattctttacatttgtagggtttctctctactatgaattatcttatgtttattaagggttaaggattgtctaaaagctttgccacattcttcaaatttgtagggtttctctccagtatgaattatcttatgtttagtaagggttgaggattgcctaaaagctttgccacattcttcacatttgtagggcttctctccagtgtgtatcctcttatgtctagttagggttgaagaccatataaatgctttgccacattctttacatttgaagggtttctctctagtatgaaatcttttatgtttagtaaggcttgaggaccagttaaatgctttgccacattcttcacacttgtaaggtttctctccagtatgaataaacttatgtatagtaagatttgaagatcgattaaaagctttgccacattcttcacatttgtagagtttctctccagcatgtattattttatgtttagtaagggttgagagtcgcttaaaagctttgtcacattctttacatttgtagggtttctcttcagtatgagttatcttatgattagcaagggttgaggaattgctaaaagctttgccacattctttacatttgtagggtttctctccagtatgaattctcttatgtttagcaagggttgaagaacggctaaaagctttgccacattcttcacatttgtagggtttctctccagtatgaattctcttatgtttagcaagggttgaagaatggctaaaagctttgccacattcttcacatttgtagggtttctctccagtgtgtatcctcttatgtctagttagggttgaggaccatagaaatgctttgccacattcttcacacttgtagattttctctttagcacagattattttatgtgtagtaagggttgagagctgcttaaaagctttgccacattcttcacatttgtagggtttatcttcagtatgaatttccttatgattagtaagggttgaggaccaatgaaaggttttttcacattctttacatttacaggacttctctgtaatataaacgcatttatgttgggttttgtgtaaacggatgcaaaatgacttgacacattttttacatttgaagcatttctttccagtatgtcttatcgtatgtctgtttgaatttaaaaatttatagaagactttcaaatatttcccacattgaaatactttgctctgggcagttgtgagacactggttaagtttattataaccttctttgtgcaccttacactcatccacacttttacaaccttttcttaactgtaaattctcatgtccacatttttcatattttctcagtaatactttttgaaaagaatcttccatgctctgctctggccaaaagtcttgaggaaaatgaggacatatacctgaaaaaaaaaaactaaaaataataaattactccactcacctagactcacatgaatatagtttaaaaatcttacctacaaaattatacaaactacataaacaatatggcactgcaaaataccacaggccctaattctatttttgtttttttgtttgtttgtttttgagacggagtctcgctctgtcacccaggctggagtgcagtggtgcaatcttggctcacagcaagccctgcctcctgggttcacgccattaccctgcacaggccctaattctttcatagacatatatatgtaacaaaaacatacagatcaaattacatctatggaaaatttatgaatgagttaagtgtgtgcagtgtctcaggggagcacaatgcaaaaaaccacacagaaaaaaaagaaaagtctgttaaatttacttgacacagcttttcctgcttcccattataacagagtgcctttagaagtaaattgccaactcctggtttatgttttaaaagaaaggtaaaatagtagcccattcatttttatttacagcttttaggggcttttcctgacactgatttccctctctcatgacataagtgttgaaagaaaccgtggcataatttggaatgaaagtttgagtctgctgagaccaaagaaaaatgttacagcagcagagagactgcagtaccacagaaaggaaacaggcatagcaagtgattactgactcctacaaagtaacataagtaaacactcttaattaagacataaacacaaaatttcagacaacacatatcctaagaacatatttgagaaattcccataatcattagacaagacagttgttttcaaactatgccaggacaaaactacattataaagactttgacagttagcttttttaaatgtccaaatctcaatcaaagattataatgtatacaaaatagggcaatatgatgccaccaaaatattataaaattttctgaaagaaaccataaaagagatgtatacattaattttatgaattggtaatgaataatactcactgattaaaataggaacagagacaactatggaaaatcggaaaaatgaggatgagaacaaaaatatttaagatttcaaaaaagcagaaattgtggaggtaaaaatataaaaactgatagatcctaaaagtaagaaaaaatgatgtaaaaataaagaagctcaacaaactaggatcacagaaagatatttataacaaacacatatataagcacaatttcaaaagtcacagacaaaaaaaaaatctttgaagctgcaaaataaaagtgatgtgccaggccaggccaggcatggtggctcacacctgtattttaggcactttgggaggccaaggaggacagatcacctaaggtcaggagttcaaggccagcctggccaacatggtgaaaccccgtctctactaaaactacaaaaatcagccaggtgtggtgacacatgcctgtaatcccagctacttgggaggctaaggcagattatgaggtcaggagtttgagatcagcctgaccaacatggagaaaacccctctctactaaaaatacaaaattagctgtgcgtggtggcacatgcctgtaatcccagctactcaaagactgaggcaggagaatcacttgaacccggaggcagtggttgtggtgagccgagatcgcgccattgcactccagcctgggcaacaagagcaaaattccatctcaagaaaaaaaaaatggtagttgtttaatatgtattaagatttagcttgcaaggtaaaaacattttagcaatatgttgcatgaaaatttcaagatgattaatatgactaaattaaatatttattttctggtaaattttgttttttttttgacaagtaaaaataataataactaaaagtacagagttatgatagttttaaattatattcacatttaaaagtgtttctcccataaaaaaatatagattcagaaataaataggatgttgaaattataagaattttatgactactcagctacacaggattagaaaatcactcacaacaaacccacacaacaaatatacaagttataaaaaatacaacgataatatttatacaggcaaacaaacatagagataattctattggaaaaagacatatggctcaatcatatttgatgttgctccagactgtcttaaattgcataaagttaaatattgacatgcacaattattatactaaaatatcaaagcacaattaacagatgtgtagtggcataccctaaaatatataacacaaaaatatacaattgcaaaaccaaattaaaacatggaatgtaaactttattaggcaccatcaactagattaacatattcattaaaaaatcttagaagaagaatatgggaaaaaataatacagagattacttgaaaataaaaaaaggtgagaaattcccaaattttgatgtaataaaagaaaaaaaattctaactaagaatacttgatttaaatttatttcactttaaaaagaagatgaaaataaaaaatttccaaaataaaaagtgagcgtgttcatcaccactagcacagttctacaaaaaaaaaaaaaaatgctacatggtgtccaggcaccgtgggctgatgcctgtaatcctacagttttaggaggcaagcctgtcagaacactagaaaccaggagtttcagatcagcctgagtaatgtgagactctgtaaataacaataagaaatgctgaaatgagtcagtaaaatgagtcagttttgttttaaaaaaatactggacagtatcataaaaccatatataaaataaagctctctattaaatgtaaatacacagacaaatatagaagtcttttttttttttttaattgatcattcttgggtgtttctcgcagagagggatttggcagggtcataggacaatagtgaagggaaggtcagcagataaacaagtgaacaaaggtctctggttttcctaggcagaggaccctgcggccttccgcagtgtttgtgtccctgggtacttgagattagggagtagtgatgactcttaacgagcatgctgcctgcaagcatctgtttaacaaagcacatcttgcaccgcccttaatccatttaaccctgagtggacacagcacatgtttcagagagcacagggttgggggtaaggtcatagatcaacagcatcccaaggcagaagaatttttcttagtacagaacaaagtgaaaagtctcccatgtctacttctttctacacagacacagcaaccatccgatttctcaatcttttccccacctttccccctcctctattccacaaaaccaccactgtcatcatggcccgttctcaatgagccgttgggtacacctcccagacggggtggtggccgggcagaggggctcctcgcttcccagtaggggcggccgggcagaggcgcccctcacctcccggatggggtggctggcccggcgggggctgacccccccacctccctcccagatggggcggctggccgggcggggggctgacccccatacctccctcccagacggggcggctggcctggcggggggctgaccagaagtctttactatcataatgatgatgcttaaaatccttaaagatcttctatagaatatttaaaacagaataaaaatggtaattgtagacaccaaaatcccattttcgataaatagaagattcatataaaaatgaataagaaaacagaaaacctagacaacattatacactgatttatcattctgcatatagaggaatacctgagaatggataatttattaaaaaaccaagtttatttggctcacaattcagcagactgtataaaaagtctgtgccagcatctgcttctggtgagagtgtcagcaagcttacaatcacggttgaaggcgaagattaactgtacacaccacaagataacagacagagcaagtacgaggtgaaggagccaggttcttctaacaaaccagctttcatttgaattaataaagtgcacacattttgattaccaagaggatggtgccaaactattcataaggactctgccccatgacccaaacacctcctaccaggtccgacatctaacatcaagaattacattgcagcataaggtttgagtaacatcaacatcaataccatattatagaccaactaggtttaacagacatgtacaaaacttttcagtcaaaagcaagggaatatgcaatatttttatttgcacctggtgtattctgttacgacacatactaagttttattaaatttaagaatgccaggtgggtggtgtagctcatgcctataatcccaacacatagagagaccaaggtgtgaggatcacttacagctaaaagtttcaggccagcctgggcaacatagtgagaccctatccctacaaaataatcaaataattattcagacatggtactttgtttgtagtcccaactacttgagagacttaggtggaaagataacttgagcccagtaggttgaggctgcagtgagtcaagattatgccaatacactccagcctgggtgacagagtaagatcctgtcttcaaacaaaaacaacaaacacaaaaaaacaacaaataaatttaagaatatcaatattatccactttgtgttttctgaccaaaactcaaactggagattaaaactgaaaaatccaaaaatacatgaaaataaaaaactcttcaacatatttttgcacaggaataaaaaaattaatttttcaaagatgtcaatacaaccaacagtggtacacaaattcaatagaatctttataaaaatcccaacagtagttttttaaagaaatactgtttgagatgttaaaattttgttacgaactatagccaaacacccatggaaaaaaaacaaaggcattataacttctgattttgaaacgtactaaaagcaacaataacaaaaacaatgaggtactcacacagataaacagatgaaagaacagagtagagaggccagaaatgaacccttctgtatatggccaaataatctcccacaaaattgacatgagcacacaatggaagataaccttttcaaaaaattctgttagaaactgaatatccattctgataaaataaagattatttccttaaaccatatgtgaaaatcttttaattagacataagaaggtaactttgttgttgttgctgttttgttattgttgttttttgagatggagtctcactgttacccaggctggagtgcagtggcgcagtctcggctcactgcaacctctgcctcccgggttcaagcgattaccctgcctcagccacccgagtagctgggattacaggcaccgggcacagcgtctggctaatttatgtatttttagtagagacagggtttcaccatgttggccaggctggtctcgaaatcttgacctcgtgatccacccacctcagcctcccaaagcgctgggcgacgaggcccagccgcataaatttttaatctcttaaacacatagaggggaggcagggcactgtggctcatgcctgtaatcccagcactttgggaggctgagataggtggatcacaaggtgaggagttcaagaccagaccagcctgaacaagatggtgaaaacctgtctctactaaaaatacaaaaattagccaggcggggcggcacgtgcctgtagtctcagctactcaggaggctgaggcagaagaattgcttgaacccaggaggtgggggttgcagtgagccaagatcacaccattacactccagcctgggtgacagagcgaaactccatctctctctctctctctctctctctctctctctctctctctctctctctctctatatatatatgaaacacatgacattagtcttggtgccaaattcttagatacaacattaaatgcatgagcaacaaagaaaaaaaccagaataatttaactacactacacttcaaaatttctgcatacttaagtaaacatttaatagagaaataatgcctcctataaaatggatgaaaatatttacaaattacatgtgataagtgtgaatatccaaaaaatataaacaacttttaaaacggaacaataaagttaaataactttatttagaaataaataattaaaataaattttcataaaaaaacacaaataaaaaaacatttgaaaggacacacaaaattactaatttgtagagaaatgcattaaaatcacaatgagaaacaaaatcccctcacacccacttaaatggtcactatccattttttaaaagcaccaaatctcttgataatgcaatcaaaatgaaacccttggctgggcacagtggttcacacctttaatcccagcactttgggaggccgtggcaggcagatcacaaggtcaggagttcaagaccagcctgctaaacgtggtgaaaccctgtctctactaaaaatacaaaaattacccaggtgtggtgacgtgtgcctgtaatcccagctagtcaggaggctgaggcaggagaatcgcttgaacccaggaggcagaggttggagtgtgataggatcgtgccattgcactccaccctgggcgacagagcaagaatttgtctcagaaaaaaaaaaacaacgcccgggagggaggtggggggcagcccccacccggccagccgccccgtccgggagggaggtggggtgcgcctccgcccggccgctgccccgtccgggaggtggagggcgcctctgcccggccgccccttctgggaagtgaggagcccctctgcccggccaccaccccgtctgggaggtgtaaccaacagctcattgagaaggggccatgatgacgatggcagttttgtcgaatagaaaagggggaaatgtggggaaaagatagagaaatcagattgttgctgtgtctgtgtagaaagaagtacacacaggagactccattttgttctgtactaagaaaaattcttctgccttgggatgctgttgatctatgaccttacccccaaccctgtgctctctgaaacatgtgctgtgtccactcagggttaaatggattaagggcggtgcaagatgtgctttgttaaacagatgcttgaaggcagcatgctcgttaagagtcatcaccactccctaatctcaagtacccagggacacaaacactgcggaaggccgcagggtcctctgcctaggaaaaccagagacctttgttcacttgtttatctgctgaccttccctccactattgtcctatgaccctgccaaatccccctctccgagaaacacccaagaatgatcaataaaaaaaaaaaaaaaaagcaaaaaacaaacaaacaaacaaacaaaacttatattgattgttggtggaaagcaggatgcacccattattttataatgttataaatgtactttaaataaaattattatcaaatacagcaattccatttatgaatctatatctaaaatatgcatcataagaccctgaagacatatttgatacaacggagtattattcaaccttaaaaaaaaacacaaaaaacttgtcacatttaaagatacactttgagattatgtcaactgaaataaactagtaacgaaacgataaatgttatgatttcactaagatatataaaatagtcacactcataaaaacagaaagtggaagggtgtttgtcaagggctagagagagcataaaatggtcaaatgttatttaatgggcatttcattttaattttgcaagatgtaaaatttctagaagtcttttgcataacaatgttaatattaacaggcctgaaatatacagttttgtttagttttttgagacagggtctcaatctgtcacacaagcttgagtagagtggcacattatggctcactgcagccttacactcccaggctcaaataatcctgcccctcaatctctcaagtagctgggaccacaggtacacaccatcatgcctggatatttcttacataaaaatgtttgtagagagggtgtctccatattttgcccaggctggtctcaaacttttgggctcaagcaatcctcctgtcctggcctctcaaaatcctggtcttacagaagtgagccaccaccatgcctggccctgacatgtacattgaaatagatttaagaaggtaaattatatgttatgtgtttttacaacaattattttaggaaaaaagacagaaaaaataaagaattataaattttcttgaaaattaccttcaaatcacaaaaactttttttcacacaaaggaaatacatattcatcattaaacacatggtgaaaataatgctatttcaaaggctactcacttacacaagacaaaaccaacattgaaagtgaactaagaggctgggcaaggtggctgacacctgtaatcccagcactttgggaggccacggcaggcagatcacctgaggtcaggagctcaagaccagcctaaccaacatgagagaaaccctgtctctactaaaagaaaaatacaaaattagccgggcatggtggtacatgcctgatatcccaggtacattagaggctgaggcaagagaatcgcttgaatctgggaggtggaggttgcagtgagccaagatcatgcattgcactccagcctcagcaacaagagcaaaactccatctcaaaaacaaaaaagaaaaaaaaatgagataagaaagaatatatacaagataagctataaccaaaactggggtcatatttgtagacataaaaacacacatatataatctgattgtgatagacatatggctcatttatcttttaattaaatcccacactgacttaaagtatacaaacagaattgcaaattgtctaaaattataatacataagtaaaaccaaaaaacaataaactcatattaaggaacttacactaaaaaacacactaatgtagaactgcaagaaaataatgaaagaaatgtttactcataaaatctagttggcaacattaatgtacgttaacaaataatttgtctagaaaacggcaatgtttgactaactgtgcagtcatggaaggcaggcactttaaattactggtatctattgtatggcaataaaatcccagagaaaatgtagtacaatcataaataggagatgctaatgagaaacttaatagataagcatttaaaagaaactagtgtcaatttttatgttttaaatatgtgctatttttacacaaaataaaattactgtaattcaagtttagaaccaactatagccttaaattgctaaattatgtatatatttagcaaaatatggttagagcttcatgtataaaacaaatatttgaggaatacattatgttattatttagttacaggctgacaaaagtggctgaaaattctgtaattcctatttgcctgcctgtatactaattacctaactcacacacaacatgtacattctagtatattgtcctaaatgtctgaatccaaaactacagacaaatttgaagtagaaaataaaaataaaaatttatatggagagtgacattaataagataaaaaaaaaaagatgccctatttgcttatctcctgacagcaagaaaatttggcagccattcctgacaaaaatgcgtttgtgagagaaccaggcatcatggttcacacctgtaatgacagctacatggcacattaaagttggagaactgcttccggtcaaaatattaagacctgcctgggttatgttgcaagaccccatctcaaaaataagtgcctttaagagagctctgagatccaggatgggagttatgaaactctgctgaagcccaagatcgaaggtaatcctttttagaaggcaagcctcattcaggcagcaaactacaggactactgtttttggctacagacaagaaaatattccacttaacttggttccactgagaattttgaactgtactctgtaaccatcccaaactcttcccagctacagacttggggaggttctgcccttccagaggcctggaggaagacacccatttatagccatgcagcaggcctgcagactttggcctttactgtggtccctgaagcaggtccatgattcagttccagctctctgagccacagttcatggccggttctgcctatgtagaaacccaaagtaacgtgggaaaatcctctcttgtactagatgaaagccatgctcatccacatcctcatataaagcccaccatatgcagacctgactgcagaaacctgcccttgggtctgccctgcagagcaaagtcctgaaggatattcactctgtccaaaaattaaatgagaattataactatccaagccccttttaacaacacaactaaaggtggacccttgtgcaaacccagcagacttaagaccaagctacaacccttcttcactacaaacccagatgacattctatcactctgaggacccaataaaaatagatttttactttctgaaaccagtctataaatacttgaacaagtgtttgctccttctttacagtcaccgatgcaaaactattgtttcttattgtcaatgcttctattttaacatagcactcaaagtatgtggaagacaaaacagtcaaaagaaaaatttaaagtcattgaaattgaagaccagtaagtaaaatgttgctttttgtagatcatgtaatcttatatatatatatatatatatatatatatatatatatataaataaacagtactttaaaacctgtttaaactaatgaatacactcagttaattagcaaaatgtaaaatgcaaaaaattagcaaaatgtaaaattagcaaaatgcactcttttctatgccatgaacagtactctggctgtcactgtaaacttgaagaaagatcattgaagggaaagtagaattcttagagattttataagcattaacagaagtgatagcataatttaaaaaaaaaattcaggcttcccagaaactatttcctttggaacacagcttctcagatcactttaaagacctgctttcttcttgactttgggcctctcatccttgtcgtctgttgtattcactctcacctacctgtgggttcatccaccatctcatgttgcttcatattccagggctcttttccttgctccagataagtaatcaggtctggcttagagagagcaatacctgttttattaaaaataactaacatgagtcttgctcatattctccacctgccaacttagtaatgtgctcagtaaagagcatataatagaatattctaataaattgtcccaatatactaatttgtaacagaaatgtttaaatatttagaagatattttaattttataggttcttaattttactgcttggtactactgtatcaaaaactggtgatggcaattagattttaaggtgtgagtaacagtattttatgccacaaaacttctgaaattaccactaatctaaagtgaaggacacagatcagctcaggaatgtggaaagttcaggtcaagatgaaacatcttgaggaaattcttttctaaacaaacaaatccccaggattttcttgaaaacagaaatctgaaagcataaatttccagaaaacattctacaaaacagaaatgaagcctgtaatcccagcactctgggaggccaaggcgggcagatcatgaggtcaggagatcgagaccatcctgtctaacacagtgaaaccccgtctctactaaaaataccaaaaaaaaaaaaaaaaaaaaaattagccgggcatggtggtgggcgcctgtagtcccagttactccggaggctgagtcaggagaatggtgtgaacctgggaggcagagcttgcaatgagccaagatctcgccactgcactccagtctgggcaacagagcaagactctgtctcaaaaaaaaaaaaaaaaaaaaagaaaagaagtaaaaccattagtttatattagaaacttagtattaaagttttccttacccaggaaggccaggtttctgtagttctctaacatcacattcctatataaattctgctgtgcagtgtccagacattgccactcctccggagagaattctatggccacatccctaaatgtcaacagtccctgaaaaacacacacaaacacacatatttacaaagtggctatgggcagaatttttcatttgactcaaggtaaaatcagaaagtgactagaactggttctgacttataagagtggctgaaattatccaataaaataattgtcaacacacaaacgttttgtaatgtattctctaactctgagaaaagagagtggcataatacccacaatatcagtgtatatatgatacttgtctagatgataaagtgtaaaattgagggcataaatattaacaagtacatttttgagtgttatatttacataatacagaatgacttgtgtatttttttcaggtgaaaaaggcatagttgttatatatttcagacacaatagacacgttgagttagaaggtaccactcaaaatttttttttttttttgagacagagtctcactctgttgcccaggctggagcacagtggcgcaatctcagctcactgcaagctccgcctcccgggttccgtgattctcctgcctcagcctcccgagtagcagggactacaggtgcccaccaccacgcccggctaattttttgtatttttagtagagacagggtttcactgtgttagccaggatggtctcgatctcctgacctcgtgatcctcccgcctcggcctcccaaagtgctgggattacaggcatgagccaccatgcctggccagtaccactcaaattttaatgtgtatgataaactagacatcttgttaatgcagattattttttcaggagatctgaaataaagtctgaattactgaatttctaaaaagttcactagtaatgccaatgttttgaccccaaaagactattctgtcaaacatccagtaagtggaacagcctgtgtttttttcagtttttctggcctgtaaacaaagatgagagctttcatttaccaaaaaaagatcaatgcaaagaaaacctaaaaaaaaaagggcagctgccagattaaatgtgatgttttatgcacatcacctgcataaagatacttaatgatgaagagaaaaataactctgtagtgaaaaaatctgtaagagagcttattaagcaagtgagttattaataccaattgcactaggacaagtttctatagtatgctgatgcaccatattgcccccactaaagtaaattacagtctcaatttaaccataagaaaatatcagttgcatggaaagttcaaggtacaggtatcttccgtgttctacaatttttaatagtgattttaagtactttctttaacaccctaataagcagctatatcctgataattttttccaaactttctgggtaataaatgccatcctgtttaaatgagcactttcttaatcctgtaatgcacagagataataaaaaaacagaacctcaacattatatgttctccatcttcactaagaatcccaggttttctccatagaaatagattatccacacctttccatgttcaacagccacaaagagaacatttttaatattgcagatcacaaattcatggtgagaattctgcatggcatataagaagccatcatgcagagaaggctctggtagatagaaaagaaatattttcagagatccttgactatcataagcttttttttttttctctttttttttgagacggagttttgctcttgttgttgcccagactggagtggaatggcacgatctcggctcaccacaagctctgcctcccgggttcaagcaattctcctgcctcagcctgccgagtagctgtgattacaggcatgcatcaccacacccagctaattttgtattttttgtagagacagggtttctccatgttggtcacactggtctcaaactgccaacctcaggtgatctgcccgcctcggcctcccaaagtgctgggattacagacgtgagccaccacgcctggcctatcataagcatttttaaaagtagttaagacaaactcattagggagaaaaaatacaggtacagaagtaaaaatttgcaagtactaaacgcgtggcattccacgaggcagagtggacacagctcttgatctgagacatgtttagctgaaaaaaagccattttttctctttctcctcctcctctcaaattctttctcagatgagtttttctggactaattatgtctgcattttgagaatttgcctttaataatttgagcacatgtttacctattaccaccacacccaaaggcagaaggcccaagacacaaaaactctacccatttctgtcctgaataacagaaaagattcagaacaatgagctgctccacagagataaaaatataagtttctcttttttttttgtcctcaggtgccctcccctgctacggacatcagcaatttctgctacagtaatacaaatattggccacactgtcctgtccttaccaaatccaaatagaacaggttcctggaccaccctttagtgcaaaggtggaacttaactctcatgaatgtatcttaaacttctcatacttgattctggcaccttagagtcacaggagacacttaattaaaacaaatagatgctatcttcagaacattaaacagaaactgtgaaaagggcacaagagagttctgtgaattggccatgtgcttctaattagaatcctgagcttataaccacttacctaagcattgccactcaagctttaattagcttataaatcacttggtaaacttggccccactctatgtaatgtgattctgcaggtttggaaatggtccataaatgggtgttctaaacaagtcccctgtcagtgctgatgtcactctctctggtctcattattagcatttgttagaaaaatgaggcacagcacagagtcccttacactcagcactcctgtcacaacacaaatacttctgatacaaatgaagacaaccattctctatcttaaagtatactacttgctggctctttaaagttcacaaagaaaacagaaaacagcaatttctgagtaagtctgcatttggaaaacaacatgtgcacatgtactaatgcaatgtttattaagcaggtactatgtaatcaacaggatgttacagagcactgtgataattcattatttgatttaattctaataacaccctgtgagttgatactaagtgttgaataatcccaaggatttagaataaggatccagcatttttatttcttcttctgtttttgtcactcatttttttaaaaaaatgcatagaataaaatctaaatatagacagatgagagggatacagatagagtgtaatgtaatttagatgaattattatgtttatatttactattttgtgacttgtgaatcaactactgtatctgcaggaacagaaaacaagttgctaaatggaatgtctctgtaaacactggttttaatataaaattattaaattaagaccctataatacatgttatttttccatttatctgctattgggtttcagaaaagtgtgagcaccaactctaaaaaggcaacaggattcattacccaaaactctgatctctactagttagttctgcgaggcaaaactccagggtagggcaagacttaaataaggccttcaaaaagggtgaatctaaacagggctgaagcagggtgtagagttgatgtaaaattctgttctttatgccactggggagtatttttagttccgtttctttttttaaacttagctaaaaaacaaaaacgaaaacagaaacttaaatctcagagtttgtgtaattttaatcttttttagccccactgccctttcaattttatatcacatactaataagcaatttaaacaaatcccttaaggttttctagaataattttttagatgataaataagtattcttagcagggcataaaaaatacaaataataacttttttgtttattaatatatgttcaggtgtagacatcacaagtcacaaaaatataaagaaaacggcccaaataaagcccatatttttgcacacatctatttattgtacccaaccttttgatgcataattaaaccacttatccagttgctagtctagactaaaagttcttgcatggtagggaccatgactgcttcatctatttttctaatgactatatgaattggaagcaattagtttatttgtttgagtctccagacctcctcatcatttttcactcaagtaccagggaactagagaaactctcacctgggtaccaaccaaagacatctcttgtatgaggggaggagcaaacacaggatgactcatttcttttacactaagttagaagcaaaattaaccactctagtcagcctgacacaattctgttctggagattctcaaatgtctcaaagatacctaggtgactgtgagagcatttccagtgaccctgggctgatggtccaataataagccagcaagagagactcaggctgattctaaatagaaaatgaaactaccaaataggcagagacacaattctgcctgcatatttaggtgacagcacacattttacagcgtaactgtgagttgactggaagcctgagagggaaagtcccctctagagtagagcttggttggcaccttatgtgtttatattatgtctggtaattctacacagtgtttgggaaatataatttttattaattctcttcagcaccagagaaaccacagtaatagaacagaaagaaaactgtctcattacacaattaagtctgaatgtcacatgcattacaatccatctgcttaagagattgaaaagaaataaagacggttaccgtaattagttcacaagtagaagaatttacagcgccatgtcataggtagttcatcctaaattcacctggtcattggggaggtcatccatgtatgctaattggttatattcaatgacaaaataagcttttcacatcttcatggcagaaggtagttttgcaacttgaagccaggtgcctgcttaaggtagactttcactcttctacaaaagtggttgaatagggtgctatctttttggctacttgcattttaaagcactggctctctactccctgaggacttgactagtgcactcctgcttcccctcttctggtggccagtgtcctcttttgtttcctaccatctgccactgtggtacagcccacagcacacggctcacagctggcagctcacatcttagatgaacgacaattgccacagcagcactttagtgtcacatcaaagagtgaagtctggccgggtgcggtggctcatgcctgtaatcccagcactttaggaggttgaggtgggcagatcatgaggtcaagagttcaagagcagcctggtcaacatagtgaagccccatctccactaaaaataaaaataaaaaatttgctgggcatggtggtgggcacctgtaatccaagcactcaggaggctgaggaaggagaatcccttgagcccagaaggcggaggttgcagtgagccgagattgcgagattgcaccattgcactctggcctgggcaatggggggaaaatccgtctcaaaaaaaaaaaaaaaaaaaaaaaaaaaaaaaaaaaagagtgaagcttgagctgcagaaggagagcttgcaggcctcccgggtagaatcgcaccttcacaataatgggaatgcgagcattatctaagccacagtttctatttataatggtgacatggaaaatatactgctgggtttccagcatgcatccagatagagatagctctaagagttctcactgtgacagcccatgtctttcacagacattatgggatactaatagggtttctaaaacagatacacaaagcattagaaagaaaaacagctctcattccgagaaagattatattgagagaaaaaaacaagttaaaagcgtcttaagaaaaaactgagattacatataagattgatcaagtcagccagaaaatattcctctaaaaataatttctctctaaatatccaaagtgcatagctactcacagcatgagaaacatgagtgttatgaagaaagggcacattatcagcagaattttagaagatttttttctatctctgctgctctctaatctgctgcccattaaatgtggaatctatatagaaatatatctgacaactaccaccagcactttttgattaaaaaaattaaaacctgtgttaatataatggaatatatgtgagcctgcaacataactaactaaacagctatacagttttggggtggccaaatcacctgcctttatttgtcctgtaatagcagcattccaatttctgaaatgaaagccactaaaattatacttacctataactatccctattggttaaattaataagtatatcagactaatctctactgtaacaatttggtaatacattttctttggatattagatataaatatgtaattatgaataattttaatatactactcataatgtatgtaggattttaaaaaattttctgcaactataattcagttgaaaaactacatttcaaaactatgaatcacaatattaaaacaactatttaaggaattcattcaaagtaaatattgtggctttatattcatactcttgcagaaaatactattgaatgtatatgaatgcaggttgtctacaaacattatacattactatgctaattgtactgaataaatagaaacaaaggtatgacaacacactccacttttcagtttataaactgaactctttttttctttctcttttttttttttttttgagactgagttttgctctcattgcccaggctggagtgcaacggcatgatctcggctcacctcaacctccacctcctggattcaagtgattctcctgcctcaatctcccgagtagctggattacaggcgtgcgccaccatgctcagctaattttgtatttttagtagagacaagattactccatgttggtcaggctggtctataactcccaacctcaggtgatccgcccgacttggcctcccaaagtgctgggattaccagcatgagccaccgcgcccagccataaactgaactcttttttcttttgtagtataaatactttagcctgcaaataatcatcatggataatcaggtttctgtcaaacaacttactcagtatcttttagtctttataattctttattgctaaatttaatcctatttttatgctcaacttttgtgtgcttttagaatgagcaagactgaacaaatctgtgtcaactttaaaagactaaaaattgtaagaacaatcttttgccaaagcaaaaacgaagcaattaatctcgggtcccagataaagacaatcctgagacaaaaaaaaaaaaaaaaaaaatgacaaaaggtttattcagctgttatttgatttatatatatttcaaaaaaagggagataaaatatatacgtaatctaaatgttataagaaaagagattttagtaagatattttcttacttttatgtagactaattaagcctcttatttctaatttatattttcttttacaacagccaggtctctaaacatgttcttgaactcctggacatctaaattttgcacactgtgtgcacatgaaagaatgtttatggaagaaaaaacagaagagagaaaggtgttacataaaattcataggttcagatgaataaagcatgttctcagagacctatgaagagatttagattcagacacaataatagtgggagactacaacatcccacaggcactaatagacagataattgaagaagaaaattaacaaaatatgagaacctaaactcaacacttgaccaaatattcctaataggtatctacagaactcttcatctaaaaataacataacatacattcttctcatcgccacgtggcacatactgaccacacaatcagaaataaaaaaatcctcaggaaattcaaaaatctcaaaattatacaaaccaaacacacagagatattaccactgaccccacaaaaacatcttgaagtctattatgaacacctctgtgcacacaaacaagaaaatctagaaaaaatgaaaaaaagtattaaggaatacatccttccaagaatgaacaaaaaagaaatcaaagccctaaacagatgaacaagaagctcaaaaactgaactgtaataaatagcctaccaaccaaataaagccaaggaccagacattcacaggtggaccagacgtacaaaaaagtgctggtattatttctactaaaactattttaagaaattaagaaaaagtaacttctctccaactcattatataagaacagcattattctgataccaaaacctggcagagataaaacaaaccaataaaattcaggccagtatctttgaacactgatacaaaaatcttcaacaaaatcatgacaaaatccagcagcatatccaaaagctaacccactatgagcaagtagaatttattttgggaatgcaaggttggttcaacatacacaaattaataaatgtgattcatcacataaaaagaactactaaagacagaaaccacaagattacctcagtagatgcagaaaaagcttttggtaaattttaacatctttcatgttaaaaatcctcaacaacctaggcattgaaggtacatgctttaaaataagttatctatgacaaaccctcagccccaatatactgaataaacaaaacctggaagcggatgggtacagtggttcagtcctgtaatttcagcaatttggcaggccaaggcaggtggatcgcctgaggtcaggagtttgagatcaacctggctgacatagcaaaaccccatctctactaaaaatgcaaaaattagccaggtgtggtggcgggtgcctgtaatcccagctactcaagaggccgaggaaggagaatcgcttgaacccagaaggcagaggctgcagttggccaagattgtgcccctgcactccagcatgagagacaaagggagactacctcaaaaagaaaaaaaaaaagcttgaaatattcctccttgaaaactggcaaaaggcaaaagatgccttctcttaacactactattcaacataaaattggaagtcctggtcagagcaatcaggcaaaagataaaaataaaaggcatttggctggatgcagtggctcacacctgtaatcccagcactctgggaggccaaggcgggtggatcacgaggtcaggagttcgagactagcctgaccaacatggtgaaaccctgtctctactaaaaatacaaaaattagccaagcgtggtgtcacgtgcctgtaatttcagctactcacgaggctgagacaggataatcgcttgaacctaggaggcagaggttgcagttagcgagatcgtgccactaccctccagcctgggcgacaaagcaaaactccatctaaaaaaaaattaaaattaaaattaaaggcgtttaaacaggaacagaggaggtcaaactatccctgtttgcagacaacaggtttccacatcaggaaaaccgtagagacttggcagaatagctctttaaacttacaaataacttcagtataatttcaggatacagccctccgcgcccaaccaatcccgggctgcaagggacctggggagctgcagcctggccagggcagtgcactcaggtggcctcgcttccctgcaggtcaccgcccaccacgccggaaccgcgcacagctagagccacttctgaagccacttgagaaaaatttgacagttcctaacgaaaaagattcttcagaaacatataccatctgtgaaaaaagttgccctttcttccgcttgcaaaacagacattctcaaattccaaaatgccagccaaggccccaatttacctgaaagcagccaataacaagaaaggaaagaaatttaaactgagacattctgtctcccgatatcatcagtccccctcttggaggcttttgccataccatccaaatcggcaaagagggccaagcatgacgtctttggagatatttcctttcttcaagggaacaatgagcttttacctggaaactaggagaaagcacacctgggtcagctccccgggcatagtaagttcttccgggccaacagcacctcagactctgtgttcacagaaacaccctcctcagtggtcaaaaataccatctccctcacgatcactggagggtcccaagctctcatgttgctcttattgtcaccggtgaactttaattccaaacaggagtcctttcggccagcaaagttgccaaggcttagctgcgagcccgtcatggaggaaaaaggtcaggagaaaagcagtctgttggagaacgggacagtccaccagggagacacctcatggggctccagcggttccgcatctcagtccagacagggcagggacagccactcctccaacctgtccgaacagtaccccgaatggccagccgaagacatgtttcaccatcccgcgtcatgcaagctcatcaagggaaagactaagtcagaggagtccctctctgatcttacaggttccctcctccccctgcagcttgatattgggccctcacttttggatgaggggctgaatgtcacggaaaaaaataagtaacaggatgcgaacttatttcctttggggtagaaggtacaaaaacaaactaaactaactgcagttgaacagaagggcttctgaagctgtatttgcagttttgtgatgggttttctaaaataatattcttataaagcatttttattttttacctgttatagcttgtttgcaaaaacaatttagaaaaaaaaaatcctgtcttggcaaaacgaggaaatctgtcagtcagaatccattttcagcaggcattggtgatgtttggctcagatattgtttgcagacacacaagaaatctagcttggccaggattggcactagctacaaagggctggacgtgtcacattagaaatttacagaactttacagcactccaacattttctgagcaagaggaagtaaaaacatatttaacacctcagccttttttctagactcttttctatatattgcttgggctcaccgtagagaattctccagtgttaaaacttttctgttttcacatttgaattttacgggttttggagattttcttgtagttcttatatatccctatatattatatctacattgcaaaattttaactgtcagctacatgttggtaagatacaggcaaagtactactgtaactaagttatttttaaagtaaaaatatatttttacatgcctttggaaaaaaataattttaggatacaaaataaatggacaaaaattagtagcatccctgtgaatcaacaacatccaagccaaatgtgatcataaacataatcccattcacaattgctgcaaaaataataaaatatctaagaatacagctaaccaggaaggtgaaagatctctataagaattacaaaacaatgcttaaagaagtcagaaatggcacaaatggaaaacaactttatgctcataaatagaaaaaatcaatatcctaaaagtgatcatactgtcctccaaaatttacagatttaatgctgttcgatatcaaatgaccaaaatatttttaacagaatgaaaaaaaaactgttgtaaaattcatataaaaccaaaaaagagtctgaatagccaaagtaaacataagcaaaacaacaaagctgaaggcattacattacctgttttcaaattatactgcaaagctacagtaaacaaagcaacatggaactggtacagaaacaaactcatagatgaatgtaacagaatagggagcccagaaataatgccacacacctacaaccatctgatcttcaccaaaagtaacaatagaaatgtggaaagaattccctatttaataaatggttgtggaataaccagctagcactatggagaagactaaaactggacccctttattacaccatacacaaaaatcaactcaagattaattaaagactgaaatgttaattttaaaatgataaaaaaccctggaagataaccaaagaaataccattctagacacagaaactggcagagatttcatgatgaaaataccaaaagcaattacaacaaaagtaaaaattgacaaattggacctaattaaactaaaaatctccttcaaagaaaaggaaactatcaacacagtaaacagacaacctacggaataatagaaaatatttgcaaactatgcttctgacaaacgtctaatatccagaatccataaggaacttaaacaagtttacaaggaaaaaatacctcattaaaaagtagacaagaaacatgaaaaagatgcttttcgaaagaagacaaacatttggctaacaagcatgcaataaaatgttcatcaataatcattagagaaatgccaagaaaaaccatgagataccatccacaccagtgagaacagctattaaaatgtcaaaaaatagatactgtcaaggtttcagagaaaagggaatacttatacattgctgttaacagtgtacattaattcaaccattgtaaaaagcggtgtggcaattcctcacagaactaaaaacagaattaccatttcaccaagcaacctcatcactgggtatatacccaaagaaatacaaattattctctcataaagacacatgcacaagggtgtttcactgcagcactattcacaatagcaaagacatggaatcaacttgaatgcctatcaatggtagactgaataaagaaaatatggtatgatcaggcacaatggctcatgcctgtaatcccagcactttgagaggccaaggcaggtggactgcctgagctcaggagtttgagaccagcctgagcaatatgggaaaatcccatctataaaaatgcatctctaaaaaaaatacaataagaaaaattagttaggcatggtggcacacacctgtggccccagctacttggaaggctgaggaacaagagtattgcttggcccaccacgatggctcatgcctgtaatcccagaactttgggaggccaaggtgggtggatcacctgaggtcaggagttcaagactagcctggccaacatggtaaaaccccatctcttctaaaaatacaaaaattagtcgggcatggtggtggtgggcatctgtactcccagctactcaggaggctgagacaggataattgcttaaacccgggaggcagaggttgcagtgagctgagatggcactattgcacttcattctagacaacaagagtgagactgtctcaaaaaaaaaaaaaaaaaaaaaaggccaggcacagtggctcatgcctgtaatcccagcactttgggaggcagaggtgggcagatcacttaaggtcaggagttccagaccagcctggtcaacatggtgaaaccccgtctctactaaaactacaaaaattagcagggcgtggtggcgcacacctgtaatcacagctactcaggaggctgaggcaggagaattgctggaacccgagaggcggaggttgcagtgagccaagattatgtcaccgtacttcagcctgggcaacagagtgagaccctgtctctaaaataaaataaaatatataataaaaaaatatgatacataaacatcatggaataccgtgtggtcataaaaaacaaacagaaaacaataaccaaaaacattgtttttgtataattcatataaaaccaaattgtaaaattcatataaaaccacaacagaggctgaatagccaaagtaaacataagcaaaacaacaaaactgaaggcattacattacctgttttcaaattatactacagagctacagtaaacaaagtaacatggaactggtacagaaaaaaacaagattatgccctttatagcaacatgaagctggagaccattattcttggaaaaccaatgcggaggccaaatgcagtggctcacgcctgtaatcccagcactttgggaggccaaggcaggcaaatcacctgaggtcaggagttggagaccagcctggccattatggtgaaacgccatctctactaaaaaatacaaaaattagccaggcatggtggtgggcacctgtaatcccaagctacttgggaggctggggatggagaattgcttgaacccaggaggtggaggttgcagtgaccaaagatcacgccattgcactccagcctggtgacaagagtgaaaccatcttttaaaaaaaaagaaagaaagaaaacaaatgcgtaaatggaaaaccaaatgcatgttatttataagtaagagctaaataataaaaacatgaacacagaggggaacaacagacactgacgcctagttgagggtggagggtggcaggagaaacagggtcagaaaaaatacctctttggtgctatacttagtaccttagttacaaaataatctatacacaaaaccaccatgacacaattttagctgtataacaaacctgcatgtgtacccctaaaccaaaaatagaagtttaaaaaaaaaaactccctgggtagggaagagtacactccaggtagaaagactggtttgtgctacagatagtggcccaggtggggctgtactctgatttatttctgggtccatgcaggcagatgagtttataaacaggtggtccagaaccccaggctggtggacaaaacagcctgctgctgcagattcagtgtctggaggtgggaatatgccagaagacttggagatacttctgtaagtttttggcaaaaaaaaaaaaaaaacactaggatcaaaaatgctgtagtaaaattcctgagtgtggttccctgtcctgggagaggtgtggacacattaatgtctagtgggtatgttagtgagtgggtgaaaatcttgtggtggtggctgtggcaaaaggggatctgccatcagagctcctttcctctaagttttaggtcctctgtcaccctggaaggggagctggaatcacagaacaagggacagtgtgacagcctgtgtagagtgcacagcctctcattcctggacacccagaggtttatactaatccaggagtctgtggtatctttcttctggcaccaaatctgtagagtttgctaaacaccaagcaattctccaacaccaacttattatctaaaacttcaattctgacaccacccagagtcagcacagaccttgattcagggctcagtctcacaacattgtcctcactgcagatgccagtcacaaactctataagcccatctatgcttctgagatactgtttagaaactggggactcccataatgttactgaaatttactaatttgttagagctactcacagaactcagcggaacactgtagtcatatttaccattttcacataaaagatacaacccgggacaggcgcgccagctcacttctgtaattccaccacttcgggaggctgagacaggcgaatcacctgagatcaggagttcaagaccagcctgaccaacatggagaaactctgtctctagtaaaaatgcaaaattagccaggcatggtagcacatgcctgtaatctcagctacttgggaggtggaggcaggagaattgcttgaacccgggagacggaggttgtggtgagccgagattgtgccattacactccagcctgggcaattagagtaaaactccgtctcagaaaagaaaaaggtacaaccccaacaaagtcatgtgaaaaaaatgtataagaccaagaataaaggtggaaaaagatgaagcacatagatgataaacagctgtgattaataaaattctctatcttttgtgttctccaagaacactttatggtgggggggcggaaaaacccttttcattatgatgcccaccaccaccacgcccgactaatttttgtatttttagtagagacggggtttcaccatgttggccaggctggtcttgaactcctgacctcaagggatccacccaccttggcctcccaaagttctgggattacaggcatgagccatcgtggtgggccaagcaatactcttgttcctcagctgtccaagtagctctgaccacaggcgtgtgccaccatgcctaatttttcttattgtatttttttttagagatgcatttttatagatgggattttcccatattgctcaggctggtctcaaactcctgagctcaggcaatccacctgccttggcctctcaaagtgctgggattacaggcatgagccattgtgcctgatcataccatattttctttattcagtctaccattgataggcattcaagttgattccatgtctttgctattgtgaatagtgctgcagtgaacacccttgtgcatgtgtctttatgagagaataatttgtatttctttgggtatatacccagtgatggggttgcttggtgaaatggtaattgtttttagttctgtgagaaattgccacactgctttttacaatggttgaattaatgtacactgttaacagcaatgtataagtattcccttttctctgaaaccttgacagtatctatttttttgctctcttttcttacctatcacacagccagaaaaacgctttgtgcattttctcctcttcctcattaaaaatcagctgactttgtcttcagtggtaaacataaaatacttcttaatctaactgaacttaagtttattttcttcccacaggctcctgaactttgagctaccctcagtctgagccaccatacaaccccattttatgtttatcctaagaacatgctgacttcagggtaaaacattctcaaaatctgattttattaccctctgtttaaacattcccctcctacctccttactaatcttgtttgcttttccctaggaaaaaaagccactgtctgcctcatctttgcaatctttaaaaatcttatagtcactacttcctcctgttgcaatactcctttgaaattcaagtttttacatacatctaacttttattttaaaaagtctagaaactgcctcaaaacaataacttcatcttcagtaagaccctcccaatacccttttatattaatcttaactgcatctgcgtgtgggttgccagctttccagggctctgtagattgtctcagtataggggcttcttccatagctgaggtgagcaagctgggacatctgcaggggaggctccccagaaggaactaagtgggtctttaaaaacctccttttgcaggctcaagcctgcaaaaggcttagcttggagtcactgggtttaagctttaatttctatgtcagagttattaacttggcttttgaaactataactaggtggtagaataattcagcaaaattatgcaaacacagtgttcatacaagggaagaaaagtttaaggtgtttacatcttatacctcagtaagaaaagcaaaagtatttattcctttcagacaataaatatattatgttattatttgtatcaaaaatcacgtagcaaacaattagtctgccgggcacagtggctcatgcctgtaattccagcacgttgggaggctgaggtgggtggatcacctgaggtcaggagttcgagaccagcctggccaacatggtgaaaccccgcctctactaaaaatacacaaattagccgggcgttgtggcaagcgcctgtaatcccagctatttgggaggctgaggcaggagaatcacctgaacccaaaaggcagaggttgcagtgagttgagattgcactactgcactccagcctgggtgacaagagtgaaactccatctcaaaaaaaaaaaaaaaaagaaaaaaaaatagtcacatgggaacacttctaggaggtatcaagtttcatcacataaaatttagcattaaactcaaaaatcaaaataccaggatatagaaccaggcacgacagctcacatctgtaatcccagcactttgggaagctaaggtggaaaaatcatgagggcaggaatttgagagcatcctgggccacatggtgaaaccccatctctactaaaaatacaaaaattagctgggagtggtggtgcacgtctgtaatcccagctactggggagctgagacaggagaattccttgaatgtttgaatccaggaggcagaggttgcagtgagctgagatcacaccattgcataccagcctgggcgacagagcaagatttcgactcataaataagacaaaaaaaaacccttaggtcaaaataagtgaacaaagcttttcaagatacagatatgtcttcctcatgtgtcaagtcaggccattcaattacttgagagattgtcccatcccatcctgctcacttaagtgctcaataaccccctctcaggagactctgaactatgccccagtgagtgcctcaggcacattatactctgcaagttcttacgccatctaactggggtcagttttttggttttttgggtttttttttgttttttgtcttttggagtgctgggtattttttttctagaaatttttttactatttttcttgcactatttttctgccccctaaaggaatccaggaggcagaaattatttgttttctcctcaatactagtatctgattggctggccagcaatgtgtctccaagaaatgaaagctgaattgggtgaaggcaatattaatgtctcaaggaattaactttaaaaaaaagtgcaccaggaaatgcctctcagcctcagggcatccacgtccacacttgagaagctaaactcaatacctcaggttgtcctatgagagaatatgacccagaagctgatattcactagacactctagcacacatagccatggtgggtatcttggtttatccccatacagtactgaaatctaggtccaagaaaaaactgaagggtgactgaagacacatcaccctatacagtttccaaaaggaaaacctgacccaaaaacattctggtaagatagctgcgtctagggaaaatagacgaaaaaaacgcacagagatattttaccatacagtgtcaggagattattctttgctttcttctcacagggagtatttaccaaaaaaaacaaatctttttaaatgtgccatcaaatgctttgtcaaaaaaaaaattaattggccagatgcggtggctcacgtctgtaatcccagctctttgggaggccgaagtgggcagaccagctgaggccaggagttcgagaccagcctggccaacatagtgaaaccctgtctgtactaaaaatacaaaaattagccagacgtggtcgtgggcacctgtaagtccagctacttgggagactgagagaggagaatcatttgagcccagtaggcggaggttgtagtgagcctagtgcgtcactgcactccagcctgggtgacagagcaaggctctgtctcaaaaattaaaaataaaaatgattaaaatcggtatcaaaatgtacactacaggacaaatagttgataaagtgaattagggaggggaaattggcatttgggaatgtcagacgaaactggaaatttagtattttactgcaagccagagttaggctggaggaacaggggatgaggggtggacttgaggccctgcttgagacacatgtaaaaaattcagggaaaaatcgtccccttttgagtgtgagaaaaattaagtggcaggcaattagattgaggtggctctagtcctcggatttctacttctaaaaataaaaatctaaactcaagagcattttttggtaaattactacattggcagaagcaaaatttaggcttaagcaactataaactgccaattaagctctgattacataagaaggatatttccacctagattgtaaaaattaagaaactaggccaggtgcggtggttcacgcctgtaattccagcactttcggaggccaaggtgggtggatcacctaaggtcaggagttccagaccagcctggccaacaaggtgaaaccccgtctctccgaaaaataaaaaaattggcctggtgtggtggcaggcgcctgtaatcccagctactagggctgaggcaggagaatcgcttgaacccggaaggcagaggttgcggtgagccgagatcacgccactgcactccagcccgcgcgagagagcaaaactccttttcaaaaaacaaaacaaaacaaaacctacataactgtacctagcaaattactgaatttggttttctttaccatgaaccttataaaaatatctccttcaaggcctttcatagaccacaaattacaaaccatagctgggtgctctacaatgtttgaatcactctttgattaaattatttaatcttttcgcggtgacgcccataaatttttaatagaaaaaaagaggccctgggaaccccacggactaaagtgcttcctattcatgagccagcacctccagtcaggattctcccctgacgaccctcccgtgatccctgcacaatctgggagagacgcggcgctgcgggagcagagctgcccagagagggctccaggccaggacacagtcactgggcagggaagagacaggacgcccggagcccgcctgtcaacgcagccgccatcttatcgctgaaggggactgaggccgagctgggcaaggagaacccgggcacggattgtggagctgactgaaggaaggcctgaggctcgccacagccgcatcccaccggtttcaacgagccccgttccctctctcgggacgtcgcacctggcagtctcaccatttctaggcttccaggggttcctggcatcttagctgtggctctccaatacctgcaggtcacagggccacacaggctgggcctcctggagcagaggacacagagcagtgaagtcgagacctggaaactccggcggcagcgagagacaaaggcccagccacatcccggaagccgccctgtccgctccagctttgtgcctgattggacagttcccagcccagcgtccctgattagataacgtttaaggccccgccttctcaggccctgagtgacagaagatgtgatcagacactgggctgaatgaagaaagagtgacagcgtaggctgcagccttttcaggcagggcttcctcagctcagccaggcccacctcagagcatgggaaaatcctctctcttctttgctctctttcaatgtattcaaaatgtgaacaaaaatatttgatgtatattaataatacataaaatttttgttccagagaaaatcaacttttactttattgtgtattatcaataataaagctaatttgataaaacattgtaagtctctcagccgggcgccgtggctcacacctgtaatcccaacactttgggaggccgaggcaggtggatctcctgaggtcaggagtccgagaccagtctggctaacatggtgaaaccccatctctactaaaaatacaaaattattgagcatggtggtgcgtgcctgtaatcccaactactcgggaggctgaggcaggagaattgctagaacccgggaggccaaggttgcagtaagcctagatcgcgccaatacattccagactgaacaataagagtgaaattccatttcaaaaaaatgaaaaataaaatataaaaattagctgagcatggtggcacacgtctgtaatcccagctactccggaggctgaggcaggagaatcgcctgaacccgggaggcggaggttgtagtgagttgagatcatgccactgcaccccagcaaaaaataaaaataaaaatacattaaaatttttttgacctctctagatttttatacatattttatgatctcttataattttttaattttttttttttgagactgagtcttgctctgtggcccaggctgaagtccagcggcacgatctcggctcactgcaacctctgcctttcaggtccaagggattctcctccctcagcctctggagtagctgggatgacaggtgcaccaccacacctgactaattttttgtatttttagtagagatgcggtttcaccatgttggccaggctggtctcgaactcctggcctcaggtgatccacctgccttagcctcccaaagtagtgggattacatgggtaagccatgatgccggtccattgtttaactttttatatttcattttaatctacattatttttactttttcaatttgaaggaacctttaagtaatttcaaagcagacaaatgtttctaactttcttcatcaaaagcatattttgcttttgtttatactctctctattttcttttaatttccaagagagaagcttgttctgtcacccaggctgaagtgcagtggcatgatttcagctcactgcaacctccacctcccagattcaagcgattctccagcctcagcttctggagtagctgggattacaggcgtgcgcgatcatgcccggtttatttccttatttgaagtagtgactggaatttgccatgttgctcaggctggtctcgatctcctaagctcaaaatgatctgcctatctcggcctcctaaagtgttgggattacaaggcgtgagccacaacacctggccttaaacattctctttgaagaattagtttttttacatctagtggtcttttattaattacattaacccttaacaaactaatttttagtgaaatccctaggaagtaattttgaactgttttatattaatatttgtagataaaaaacatttatatattttaatgttaaatacagtgagttctaaattgctcttcaaagaatcagtatgtcagtatattcagctccctgttcttcattctccattttaaagtttaacttctttgttgtttttgtctccagttttagtaaacaaccttcccgccagttctaatcagtagtttacatctgtacccctggtcacctgctccatcctgagtcacccctggtcacctgctctgacctgagtcaccttggtcacctgttccataacagtagttcccacccaaactgctcaccccaccactctggcttgtactcctcctctctttaaaatagccaatgggaattagcttagactgtgcagtccaaccctagccaataggggaatgacacagcagtaggggctacctgcatcagggctaagaactcctttccctcccttgttcaggtgtgctcttgccattgctccattcgcaagatgcacccttctataaaagtaaatattgtcttgctgagaaaatttacattcaagtactatttcctttgcggcatcaaaaatttgcttctaacatttaataaaagattttttttttaattttctgtaaacgaatctaaatatagttagcttttttataacatattaaagattctgggctgggtgcagtggctcacgcctgtaatcccagcactttgggagactgaggtgggtggatcatgaggtcaggaattcaagaccagcctggcaaatatggtgaaaccctgtctctgctaaaaaatacaaaaattagacaggcatggtggcgtgctcctgtagtctgagctactcaggaggctgaggcaggagaatcacttgaacccagtaagcagaggttgcagtgggccgagatcgcaccactgcactccagcctgctgacagagtgagactccgtctcaaaaaataaaaagtaaaataaaataaaaaaattatagtcaggcatgttggctcatgcttataatcccagcactttgggggagcaagtaatgaagactgtttaagcccaggaatttgagaccagcctgggcaacatggcaaaaacacatgtctaaaaaaaatttaaaaattaactgagcatggtagcctgcacatttagtaccagctattcaggaggctgagggaggaaaattgcatgagcccagaagtcgaggctgcagtgagccctcattgagccacttcactctattctgggtgacagagaccttttctaaacaaaacaaaacaaaacagccaaaacatagaaagttaaacttacggggttttgtgtttttttgtttttgtttgtaattattattacttccaaagtttttaaggtacaggtgatgtttggtcacatggataagttcttttgtaatcatttctaagatttaggtgcacccatctcccaagcagtgtgcactgtacccaatatgtagtcttttatccctcacccctctctcccgccctttctgctgagtacccagagtccattacataattcttatgccttcgcattctcatagcttagttcccacttataagtgagaacatacaatgcttggttttttattgctgagttacttagaataatggtctccaactaaatcgagattgctgcaaatgctattattttattcctcgttagggctgagtagtatgcattggtatatatatgccacattttctttttccactcattagctgatgggcattaggctgcttccatatttttgcaattgcaaattgtgctgctataaacatgtgtgtgcaagtgtcttacacatataatttctttttcttcatgtagatacacagtagtagaattgcttaatcaaatggtagctttacttttatttaatgaatctccatactgtttttcatagtggttgtactagtttacatacccaccagcagtgaaaaagtattcttttttcaccacagccacgccaacatgtattattttttgatgttttaatcatggccggttttgcaggaatatattggtttggttcagaaaggcgggacaactcaaagcgggcggcttccaggtaaatttaaatattttgtggttgacaagtggtggaatctgaagacctgggatcaatgaaagggaaggtttaggttaaggtaaaggattgtggagaccaagttttattgtacagaggaatctctcagataggtgaattaaaagagagagcagtttgtaaaatgtttattagacctaaacgggtgcctggctcttagttgattatctcctggatctgcaaagaaaaaaaggaaaacaaaaggggaaggggattctctacaaggcctaggcatgagaggagagtcacatcaagttaagtactgggccacgtgacatatcacaatccccatgtggacacattccagtaagacaacacctaggtgctgggcccaggaacatatgactgtgtcttttataggcaaacacagggtagaagaggggaggggataacaatcaaacatctgatgggccaagagatatgtcacaatgccccctgtgggcagggtccaggctggagacacatatcaccttggcgttgggcccatgaatatgtgacagtgccttctgagggcaggcccaaggcaaaagagtaacatcattatgcggctgggcccagtggtttgttacaatctctgctgcagttgaaacctagaaagaagagaagaatcaggccaggtgcagtggctcatgcctgtaattccagtactttgggaggccgaggcaggaggatcacctgaggttagaagttcgaaaccagcctagccaacatggcgaaaccctgtctctactataaatacaaaaattagccgggcgtggtggcacatgcctttaatcccagctacttgggaggccaagtcaggacaatcgcttcaacctaggaggcagaggctgtagtgagctgaaatcatgccgctgcactccagcctgggcaacagagtgagactccatctcaaaaaaaaaaaaaaaaaaaggaaagaaaagaaaagaagagttacaccagctaggtgtattgggcctagcaatatgtcacaagttgttttgtgagaaggaactaagcagtaaaagggaatcatattacctgggtgatgagcatagagatatgtgacaatgactcctgcaggcagaacccaaacaagagagtgacattacctgggttttagacccagcaatatgtcacagtgacccatgtgggcaaagcagaggcaggagagtaacataacctagtggggagggcagcaatatttcacaattttcattgtggacggcaccaaagcaggagagaaaactcccatcacttgggtgcaaggcccagtgatatgtcacgatgccccatataaaaacacagaggcaagaaaatagagtcacatcacctagtttctggtacagtgatatgtcacgattccatctatgggttaaatccaggcaggagagtaaactcactcaggttctacacagaggcatgtgtcacaatcacaagtgcaggaagatccaagatgagattaacaatcctgtacatattccgcttctgtgtgcagcagcaaggcagaagaggagactcacattacctgggtgtaaggctctgagatatgttacaatgtctttttcgagtagcaccaaggcagaagaatagagttacatcacttaggcactgggtccagcagtgtggcacaatcctatttgtgggccgggccaattctgaagaatcacattactcaggtgctgggcagaagtgtgcgtcaaaatcacacctgaaggaaagaccagagatgagattaacaatcctgtacgtaccctaattcttggtatgagagtcaacacctcctgtatgttgggtctaagtacatagtcacaatttttagaatgagctgaatcactgaatgagagactcaatccctcttactggctgtgtcaccttagtggaatcagacaaacaggtgtgttcaatcttggtctgaaagtcaccaacttacctttggactggattcacttatgagtaaattttacaacttgcaactgtctctgcatatgagattcagaatttccagtggaccgttcttgtgaaaagatgataatctttactgtcgactgggtatacaggaatgtcaaaacagctgtacactgagtctagctagaatactctctgtaccaaccgaggatttataaggtatgcatgagagtcacaatcttttgtgactaggaaacatttgtgctggtatgggcccatgatcatacctgtggctctatgctcagatgagagagtcaacatctctgtaatggctgggtccagatatgagagttgacacctgcctataagctaggctaatgagtcaccacctcatgttgcctgatgttcacatatgacagtcacaattttaactctgcactgcatccacatgtaaaatttaagacctcaccagtaggctctgtccatggatgagggtgacaatcttaacaattggcaaactgtgcaaatataaaacaatctcgttttctggaccctgttatgacactttctggagcactggagggctttatacaatatgggagagactgtaattttctttaaccttcctacaaaggggagagccagaatcttacccattttcctaagcccacatatgagagatagtatgtctcctattggctgatttcagatatgagagtcaacattgcaccaatgatctgaacaaagatatatgtcacaatctcccctgtggatagggagagagcaggagacttatatcatctgtgtaataggccaggtatatgtcacaatcttctctgagaacaggcacaaggcagaagagttaaaaactgggtgcttaggcatataaattttctcctgaaatcagggcacagagagtagagtcacattacctgggtgctgagaccagagatatgtcacaatgctttctatgagcaaagctcaggcaggagaaacacatcacttgatttctgtgccagaagatgtgtcacaatctctcatatgaggaaagccttggtagaaaaggagagtcacatcaaatagttgatgctcttaaagatatgtcacaatgctctgttgtcagggtccatacggaagactcatgccaccttgttgctgggcccagcaatatgtcacaatgccttttcaggtacaggccaaggcagaacagtaatgtcacattggcgtagagccccacaatatgtctcagtcttccttgctagcagaacctatgatggaagaagaatcacacttgtttggtactgagccacatgatatgtcgcaactccccctgtgagcagggaccaggcaggagaagaaagtcacatcatgtgggtgaggtgtgaaaatatatgtcacaatgctccttgtgggtagtagagttgcattaccagggtgtatgtcccagcaatatgtcacaattgcttatgtggtcaggtgacaggtaggaaagtcaaaaaacctggtgtggggcccagagatatgtgacaatgcattctgtgggcagtgccaaggcaaaggagactcacatcacctaagtgcaaggcccagcgatatgtcacaatgccccctgtgagcagcaccaatgcagaaaaagagagtcagttctgggttcagctatatgtcactattccatctgtaggcaagacagtcagatcactcaggtgctgggcagagaaatatgttccaagtaaacctgtgagaaggtgcagggatcaaattaacaatcccacacatgttccggttttaggtataggaggttaacccttcctatatgttgtgtctaagaacaggagttacaatctcaacagtagacaaaatttgtacctaacagcccatactcctgctgtggacttagtctaattagtgaagtcacagcctcataggcgtgctgattcttgctctgaatgtcaccaactcacctgtggactggatccaaatatgagagtcaagttttccacctttgacttcctctatgtgtgagattcagaactcacaatgatgatgtgtactgtttgatgggtgttcatacaatggtaaaagtctcctctgtgtgctgggtcttgttagtacactttttttcttttttttttttttgagatggagtctcacaatgtcgcctgggctggagtgcagtggtgcgaccttggctcactgcaacttctgcttcccgagttcaagcgattctcctgcctcagcccccggagtagctgaaattacaggcgcctgtgagggatcagtcagaatggtaagaaaaactatagggaaaggacgcaaaccttctgaaagttcggaaggttctgcaaagacccaggggagaatagctgaaggcagctgctttataaccctgaggcagagggccaggagtaggtacagtggagtgtaggggaatttatcttaaacaggcttgtttacttatattgaccaggaactgacctttgatcatccacgggagtgacgatccctgaaaggagaacaataaatgttaattacctgcaggttgtgtttgctccaggtttttggcattgtgcctgcactgaaagaaagcaagcagctccagcttcttggggcagctctctggccactagaggcaggccattatctagctgctgttacactgcatacctgtgtctgagtactaattctatccatcagccagggcctgcaggaaaggcccagtaggcggccacatccatgctcagctgattttttgcaattttagtagaggcaggttttcaccatgttggccaggcttgtctcaaactcctgactcatgatctacctgcctcagcctcccaaagtgctgggataacaggcatgagccatggcgcccagctagtacactctctatactactcaaaggctttatccagtataaataagagtcacaatttactctaaagtcatgtttgtaagcacccatgaccatacttgtggctctaagtccaggtattagagccaacatctctccagttggtagggtttatatagtagagtcctcatctgctatgttctgagtttagaagtgtgtcaccatctcaactgtggccggaggctcatatatgacagtcacaattccaactctggacagtgtttgcatttgagattcaagacctcagcaatgggctcttttcatgtgtaagggtgataatcctaatggttggtgaggtgtgcatataagaaacaatctcacctttgtgctgtgtgccttgggataacactctttgtaacactcgagggcattatatgatatgttggagggtggcaattctgtatgaccttcataaaaagagaagaccaagaatgtgactcatttttctaagtcgagctatgagagacagtatttcttctaatagctgactagaggtatgagagtcatcattacacttataagctgactacagtacatgcctccatttaacctgtaggtagagagttagcaggagagtcacatcacctgggatttcagccaagggtatctcacaatcttccctgagggaaagaaccaagcaggaatatcacatcacctgggtgctcatccagggatatgttacagttctctcctgaaagcacagcataggcaacagtcacaacacctaagtgctgagctcagcattatgtcacaatgctccctgggggcaagacagaggcaggagagccacatcacctggtgtctgcttccagggagaagtcgcaatctttcctgtgcagggcaggttgcaggcaagaagtgtcacatcttttaggtcatggatgcagatatatgtcacaaggtcactgtgggcacagcccaggcaggagcatgcaatctcataggtagtgggcctagtaatatttacaataccaaaaatatgtgaggccgaggaaaaacaggagaattgcaacacctagttgctgggtctagtgatatgccacaatcctcccttgccctctgtgaaaatgccctctgtgaaataagaatagactcacattacctaaatgctgggtccagcaatgaagcacaatcccatctgtacgctgggtccaggcaggagagtcaaattactcaggtgctaaaaaaaggtgtatgtcacaaacacagctgaattaaggttgaggtatgagattaacaatttcacacattttttagttctagctgagacataattccctctgtatcttgggtgtaagtacctgagtgacaatctcaatgatagtctgaatttgcatatgagaacctcaatccctcctgcaaattgtgtcattttagtgaagtcaccgactcacaggtgtgctgaatcttggtgtcagagacactaacatctctatggatcgaattcacataatgagattcaattttccaacttttgactgcatctgcataagagcttcagaacctcaacagtgagctgtgtttatgtggaaggatgacagtctttactgttggcaggctatgcatatgagtgtcacaacctcctctgtgtgctgagttctgttaggacattctctgtacctcttgacaactttacacagtatgtgacagagtgttctttatgaccttcatacaaagaggagacccaagacattactcattttcctgaccctggctatgagagatagtgtatctgctattggttttttcgaagtttgaaaatcattattgcacctttaagtttgaacaagatatgcatcacaatcccaccaatgaaaagggactgactagtagactcacagcacctgcattttggggcagtgatatgtcagaatctcctctgagggcagggacagggcagaagtgtcacaccacctgggtgctcaattagggatacgttacagtctcctcctgaaagcagaatacagtcagcagtcacatcacctggatgctaggcccagtgatatgttacaatgatctgtgggcaaggaccaggaaggaaaaacagatcacctgattcctgagaacagtgattcatcacaatctttccagtggtgagggtgcaggcagaaaaggggggttaaatctcaaagataatgggtacaaagatatgtcacaaggccacttatgtgctgggctcaggcagaagcctcccatctcatgtctgttgaactcaatgatacatcactatatccaaaatatgccagaaataagaaaaataaaagggtcacataacctaggtgatggaaaggagacatgtcataatacttccgtgggcagttcccatgtcataaagttgtatcacctaagtgctgaatccaggcatatgtcacaacacacaatgcatttagggcttaggcagaagaggagagtcataacacataggtggtgagtccagcaacacatcacaaatccctgcttgggcaaagccatagaaaagagtcgcatcacctatgtactgggctcagtaatgtgtcacgctacccccttaggaggagggcccatgcaagagagtcacatcacctatgtaacgggttcagcaatatgtcacagtacccattctggcgcaaaagagtcacatcttctaaattatgggcaacagagccaggctccatctcaaaaaaaataaagagtcacatcacctaataagcggtctcagagataagacaccatggccctcatgggtagggctcaggaagaagtgtgaagtcacataacctttgagctgggcccagctatgtgtcaaaattacttcagtgggcagggcccagacctaagaaaagagtcatatcatgtaggtacttggccaagcaatatgccacaatccccactgtggacaggtcccaggagaagagtcacacaatctcagcaattggcccagatatatcttacagtgacttttgggagccagcagaagaatctatcacctgtatgctaaactcagcaataagtcactctctctactatgggcaaggcccacgcagaaaaggagagtcaaatcaccttggtgctgggcccaaagatatgtcacaatctctttttgggcaatgtccaggtaagagagtagagtcacataaaatagtcaaaaagggccaagcgaaatggctcacccctataatcccagcacattgggaggctgagtcgggcagatcggctgaggtcaggggtttgagaccagtctggccaacatggtgatacctcgtctctactaaaaatacaaaaattagccaggcgtggtggtgcacacctgtaacctcagctattcaggaggctgaggcaggagaatcacttgaacccaggaggcaaaggttgaagtgagttgagatcacaccactgcactccagcctgggtgacagagtgagactctgtctcaaaaataaaattaaaataaataacataaaataaataaaatagtcaaagggccccagatatgttacaatacaccttgtaagcagggtccaggcaggagactcatatcacatttgttctgggcccagcaatatatcaccataccttctgagggcagtgccatgacaaaagagtaatgtcaccttagtattaggcctagtgacatttcacaatatcccctgcaggcaaaacacaggaagaggagaaaagtcacattagctaggtgctgagcccagtgatatgtcacaatcccttctgtgagcaggggccaggcaggagaagagagtcacattacctgtgtgatgggtgcagggttatatcacaatgtccgctgtaggcaggaccgaggcagtagagttacatcacctgggtgttggacccagcaatatgtcacaatggcctacatgggtagggcacaggcaggagactcacataacctatgtgtggggcccagcaatatgacacaatgccccctgtgaaagagccaggctggagagaagattcacaccatctgggtacaagacccagtgatatgtcacaatgcccactgtgggaagtgccaaagcagtagaacagttacatcactttggtgctgggtccagtgatatgtcacaatcccttctgtaagctgggcaggagcatcaactcactctggtgtcgggtaaagtcatatgtcataattacactatcaaaaatgttcagggatgagattatacatctggactgggaagaatcaacacatcaaaaatatgaccaggccgggcacagtggctcccgcctgtaatcccagcactttgggaggccgaggcgggcggatcaccggaggtcgggagtttagaccagcctgaccaacatggaaaaaccccgtctctgctaaaaatacaaaattagccagtgtgctggcacatgcctataatcccagctactcgggaggctgaggcaggagatttgcttgaatccaggaagcggagattgtggtgagccgagattgcgccattgcgctctagcctgggcaatgagagtgaaactccatctcaaaaaaaaaaaaaaaaaaaaaaaaaaatgaccaaaccaggcacagtggctcatgcctgtaatcccagcagtttgggaggccaaggcgggagaatatctggagcctaggattttgagactatcctgggggccacatggtgagacaacacctatattaaaaaataataattacagttaaaaaaatatatatatatatatgaccagcgcctgaaaaacatagcaagaacacatctctactgaaaaaaaaaaaaaaacatagatgattgattggtagacagagagacacacagatagacagatagatagatatagatagaaccagtcatggtggctcacgcctgtaagctcagtaatttgagaggtctaggccagcacatcgtctggctgcaggagtttgagatcagcctggaaaacatgatgggaccctatctctacaaaaataaaaagtaaaatatacaaaataaagcgccagtgtggtggcgcatgcctttagtcccagctactgggaagtggggtgtctgagacgggaggatcacctgagcccagggaggtcgaggctgcagtgagctgtgatcatgcacctgcactttagcctgggtgaaagaaatctaaaacaacagcaacttcagtgtacgggaaggagcaagagagacaaagagaaaaaaagaaaaaaacaacagaactcaatgtactgtgaaaacaaactcaaagtggtgctaaaaaaaaaaaaggaaaagaaaaagaaacagaaagatcctgagagccccagctatttgggaggccaaaataagaggatcaactggatgagcctaggaaggtaaagagtgcagtgagccatcattgaactcctctgctggaccgaagctgtactgtcccggtgagagccatctggtccaccgtaaacatttccagctggcaaccaagtcctacgctcgtggcccacatcctgtacacctggcagccagaaagagaagccagctggtggtggaggcagaagcagaagcccactgtgtctaccgtacaggccacatgtggcactcgcggcctgaagctgtccctgttggaaccttatttcccccaaggcggcccacctccgcagccagcctctaagtctgccgaccttccttcctaagctttgaatccctggtccacccaaacgagaggccagcagccacaactactggccacagctcgccacccacatctggtcacccggtggccagaccgagaagccaacgtgtccaccctgcaggccatgtgtggcgctcgcccctgaaaacgtccctctggcgtctaagtctgtgagcttcccatcactccctgggtgacagagtgagactccatctcggaaaaaaaaaaaaaaaaaaaaaaaagatgatggggaagaagggagggagggagggagggaggaagagaggaaaaggaagaatgaaaaggaaaaacaagaagaaaataaaagaggacagagcatggtggctcaaacctgtaatctcaacactttgggaagctgaaatgggagaattgcttgagcacagaattttgacaccagccctgggaacacaaagcagaaggaaaggaggaaggagagaagaaagaaaggtaggaaggaaggaaaaataaaaccaaaaaagttcagggaacatcactcgcactgatgatcaaaggtcagttcctggtcaataaaagtaaacaagcctgtttaagataaattcccctatactctgttgtacctactccttgccctctgcctcagggttataaagcagctgccttcagctattctcccaggaggctttgcaaaaccttctgactagaaatacaaaaattaggtgggtgttgatgagcctgcttgtagtcccaactactagggaggctgtggcaggagaatggcttgaatctgagagactgaggttgcagtgagccgagatcatgccactgtactacagtgtgagtaacagaatgagaccctggctcaaaaaaaaaaaaaaataaaataaaaataaataaataaataacttcttacctaaatctagattcatcatattttacaaaatctagaaacaacctcagaacaataacaactccattcccagaaagagcctcccaaccccacctttgtgccaatcccaactgcatctgcctgtggatttcaaggttttcaaggctctgtggcttctctaagtataaaggctctgtccatggctattgtgagcaggccaggacatctgcaggggaggctcctcaggcagaagagctgctttttcaatgatctccctttgcaggcaaaactatccttagcttgcagtcactgagttcaggcttctacttcccagtcaggattattcacttagtttgaaataagaaaatgaccaatgtatggccagacatgatggctcacgcctgtaattgcagcactttggaaggctgaggcaggtggatcacttgaggtcaggagttcgagaccagcctggcaaacatggtgaaaccctatctctactaaaaacacaaaaattagccgggcgtggtggcatgcgcctgtaatcccagctattcagaaggctgaggcacgagattcccttaaacctgggaggctcccttaaacctgggaggcgcaggttgcagtgagccaagatcgtgccactgcactccagcctgggtaacagagtgagactcagtctcaaaaataaataaataataataattaaaaaaatgaccaatgtttcaaaaaagtgcaaaatcactccaacacactgtttatagaatagtgtaaggaaattgtaagacttaaattttcaactacaatataaaaagcttaagtaaggctgggcatggtggctcacacttgtaatcccagcactttggaaggccgaggcaggaggatcacctgaagtcaggagttcgagaccagcctggccaacatggtgaaacccatctctactaaaaatacaaaaattagatgagtgtggcagctggcaactgtaatcccagctactagggaggctgaggcaggagaatcgcttgaattcaggaggcaaaggttgtactgagccgagattgtgccaatgcactccagcctgggcaacagagcaagattccatctcaaaaaaaaaaaaaagcatctgtccttttcagatgataaacatctcatttaactatttccatgatagataatttaataaacaatcatatgtgaacatttctagaagatgtcaagttccatctcataaaatttagcattaaacttggacatctagacaacagaatacagaacagagattatccactgttacaaattctagacaccacaaaaaagaggagctgatggtttgagaaatatatacaatgcaccaattaatctatcacatttgcttgtggaaatatattcactttgtatagccataatgaaaaaaagatttttcctatttcttttctctggtagcattcccaaagcaaagcctggggttctatttaaaatcatgcaaccaggaaaagcagacatgagaaacttactacactcactctggagaagataaaggtaaataagaatctttaatacataaaatatatgagtagatttttctgaaatatacctttcatagtctgactttttaaacatcttttaaactcttctgataaaatataagttacagttattaaaaaactgaaatagaaatgtgaaaaaatctttccaaggtaaaaaactcaggaagaggcacatgccacaatgcctgactaatgtttttgtatttttagtagagacggggtttcaccatgttggccaagctggaaataattttttactctgcggccaggtgtggtggctcatgcctgtaattccagctacttgggaggctgaggtgagagaatcgcttaaaggcggagggaggctgaggtgagagaatcgctgggaggcagaggttgcagtgagccgagactgcaccactgcactttagcctgggcaacagagaaagactgtctcaaaaaaaaagcatactctgcactagcagcattaacacaaaaagttctagtaaaccctgacacccactcaaatgtcacatcctctataaagccctccttgattttcccagtgctatgtcactggcagaattgatcactattaccatttagctcctcaatactttataagtctttttatgtacaagggttattctctccagaataaattaatcatttacacacctatccatgctaatgaactataaactcctatggggcaggtatgttgaaccctgttcatctgtgtaatccaaatgtctgatacttaataggtgtcatatacacataaaatcaaaatgctgtcagggaattattggaaaagctaccaaattcttttttttttaacttttaagttcaagggtatatgttcaagttttttacataggtaaacgtgtgtcacgggggtttgttgtgcagattatttcatcacccaagtattaaggcctagtacccattaggtatttttcctgatcctctccctcctccaataggccccagtatgtgttcttcccctctatgggcccatgtgttcccatcatttgactctcacttataagtgagaatatgtagtagtttgttttgcttttttttttttttttgagatggagtttcgctcttgtcacccaggctggagtgcagtggcactatctcagctcactgcaacctctgcctcccgggttcaagagattctcctgcctcatcctcctgagtagctgggattacaggcatctgccaccacgcctggctaattttttgtatttttagtagagatgaggtttcaccatgttgctcaggctggtatcaaactcctgacctcagatgatccacctgccttggcctcccaaagtgctggaattacagctgtgagccaccacatccagctagtatttagttttctattcctctgtttgctaagaataatgtcttatggctctatccacgttcctgcaaaggacatgatctcatttttttttaatgggtgcacagtactccatggtgtatatgtactacactttctttatccagtctatcattaataggcatttaggttgattccatgcctttgctattgtgaattgtgctgcaatgcacatatgcatgcatgtgtctttataatagaatgattcacattgctttgggtaaatacccaataatggattgctaggtcaaatggtattttgtctctaggtcttcaaggagttgccacactgtcttccataatggttgaactaatttacactcccatcaacagtgtatacgcgttcctttgtgaaaaaataattttaattttctaaaaggttagctttctaagacaaatggtatgcgaggaaatttccacaggcctaagccatccagctgctcttctgagaggctacactcttcctcctcaggctgtcctctaagagatgacccaggggatgatattcattagacactccaagagatatggccactgtgggcatcttgggttatccctgacggttctgaaaatcatgaacaagaaaagaccggagggctgccacaaagggccctggaatttctccaaagcaaaacttcaaccgaaagacctactaacaaggtgtatgcaccagggaagataaaaggacagtcacagagattttttttctttttaacagtggagttccagaggattattttctcacgtaacatgtttacagacttcggaggttgaggcgggtggatcacctgaggtcaagaattcaagagcagcctggccaacatgaggaaaccctgtctctcctaaaaatacaaaaattagccgggcatggtggtgggagcctgtaatcccagctacttgggaggctgaggcatgagaatcgcttgaatctgggaggcggggattgcactgcactccagcctgggcaacaagagtgaaactccatctccaaaaaaaaaaagaaaaaaaaaattgtatacagacaacaattattttaaaacctgccatccactgctgtgtaagaacatgattaataataaaaacactgtgtttgaaatgtaaaataaaggacaaatagttgatagtgttgtaaattggagagaggaagttgttctcatttccacttttgagaatgtaggaacaaaggtggaaatttataattttactacaagcctgagttaagctagggtaaaagggtagtggattagaagtcctgcttgccatacattaggaagtcacagaggaaaaccagtcctcctgtggagtgttatttaaaaagcaggaaattagactgaaggggctctagtgccctgtgttcataagtaaaaaatgtaaaacctatctcggattcacttcttataaattattttaggcagaaacaaaattcaggcttaacctgcaattaacctctgattacataaccaggaaatttccacccgaatcatacaaataaggtgactacataaactgtaaccaattcttgaatttggtttgccttctcacacgcccttttcaaaacccttccctttttgcctttcaggtggcccacatattatggctgggtgctttccatttcactaatcactgctcagataaactcgttaacgttttaacgttgactccctttactttgcaagagaagaagctgggcgcggtggctcatgcttgtaatcttagcactttgggaggccgcggcggtggggggatcacttgagtccaggggttccagaccagcttccaccatggcgaaaccacttctctactagaaatacaaaaatcagccaggcgtggtggtgcaggtctttaatcccagcttttcggggggcttaggcacgagaatcgcttgaacctgggaggcggaggttgcagtgatcacgccattgcactccagcctcggcgacagagcaagactttgtctcaaacaaaccaacaaaatgtttaacaaaagagactgggagccccaccggccacagctcctcctacgcacacacgagtcgggattctgccctgatgacccgcctggcatccctgaacaatctgggaaacactcggggctgcgtgcagagctgcccagggagctccagatagggcgccgcagggactgggcgggacgcgcgggtcattgctgcgggcccagccaccatcttgcggccagagggacctgggacggagctgcgccagcagggactcaggtcggcaacccaggagcggtgaggaggccagtcccgtcggtttctcagccagctctcccctctcgggatgctcaacccctcacactcaccctttcccaccttctggaatgtcctggcatcttagctgtctgtgcacgtcccaggacctgcagatcacagggcaacagcctgtcaccggctggggcgagaggggggcagaggtggaggacgttgaatagcagaaagcgatcccaagctctggctgcagcgagagacaaaagccccgccaaatgccggatgccacgccctcctctccaactgtgccactgattcgataaagcaccagcactcgcccagtaccactccctccacccccaggaaaacaggctaaagcagggagtgtcaaccatagggaattacagccaattaagaagtaagctgagacttgaaatgaacttgctctttcccttacctgggtctgcttgtataatgcatcttatttgctacttaagggtaagaaaagaacatttggattatttttgtttgtttgagactgagttttgctcttattgcccaggcttgagtgcaatggtgtgatcttgtttcactgcaacctctgcctcccaggttcaagtgattctcctgcgtcagcctcccgagtagctgggattacaggcgcatgccaccacacccagctactttttgtatttttagtacagacggggtttcgccaagttgggcaggctggtctcgaactcctgacctcaggtgatcctcccaccccagcctcccaaagtgctgggattacaggcgtgagccaccatgcctggcccatttgaacatattttaacaactttttaatgattttgataatgcaggaaagaccctcatcccatccctgagtacctctctcatcatgctataccacgctgttgaccacatcgtgggatggccattaggaatggggcaggggtgggggaaagcggtggctgagaatggttaagcaaaaattatgttacccaaatttgtttattttagaaagacttctcaatcattctgtgtgaagtgtgtattccagggtaattgtgccctgactgcactgcatctcaatctgacttctcttttttaaaatcactggattactgtcactaatggggtattttattttctattttatttctatttgaaaatggccaactgtcctttgtgggtgtcctgatttgatttgctgggttagaccatggaggtaagagtgaggaaatattgggtcacatcagaataacttattctcatttagagaatatataggaattttttcttttttgagatggaggtttgcttttgttgcccagaagggagtgcaatcgtgtgatcttggctcactgcaaccttcttctcctgggttcaagcgattctcctgcctcaacctcccgagtagctgggattacaggctcccaccaccatgccctgggtctgtcagggtttcatcatattggccaggctggtcttaaactcctgacctcaggtgatccacctgcctcggcctcccaaagtactgggaatacaggcatgagccaccgcgcccagccaggaatttcttaataatatataacagttttctcaatacccattttatatgtatatgtatgtgtatatatatatatatatatatatatatatatatatatatatatatttttttttttttttttgagacagtgtttcacttttgttacccaggctggagtgcaatggcatgatctcagctcacctcaacccccacctcctgggttcaagcgattgtcctgcctcaatcctcccagcctcccgagtagctgggattataagaatgcgccaccacgcccggctaattttgtatttttagtagagatagggtttctccgtgttggtcaggctggtcttgaactcctgacctcaggtgatccgcccacctcggcctcccaaagtgttgggattacagccatttgccaccgtgcccggccaataccattatatttaacagtgatagcttacagggcagggaggggacacatatgacacaaccttagaattttaatttggtcgtaagtttttttgttttgttttgtttttggagacaaggtctcactctggtacctaggctggagtacagtggcacaaccatagctaataacttggttgtaacagttccttaaaaaatatttttggcagagtttgatggctaacacctgtaatccaaacactttggaagaccatggtggaatgattgcttaaacctaggagttcaagaccagtctgggcaatgtagtgagattcagtctcaacaaaaacgttaaaaattggcctcatgtggtgttgcatgcctgtagtcccagctacttgaaaggctgaggtggaaccatcactggaggttgaggctgcagtgaccagtgacccatcattcagctactacactccagcctgggtgacagagtgtatacacacacacacacacacacagagacacatacatatatatatacacacatatatatgtaccctatgtatataatcaaaataatatgtatgttgaaagaaattcaagcacagaagaaaagtgaaagaccctggttgggaatgtggtaaaagatgagcatggctcttacggctcagtgagatttgtttttccatcttgaggaactgctctcccacactgaaaccacaacccagcacatgccagttctcacactatttatactttgctcaaaggcagcagaaataggccaacatcatggtttctgacatggaagtctattccccactgagacattttaaaaatgttattctccctctccctctccccctccccctccccctcccccccatccctctccccacggtctccctctccctctctttccacggtctccctctgatgccgagccgaagctggactgtactgccgccatctctgctcactgcaacctccctgcctgattctcctgcctcagcctgccgactgcctgcgattgcaggtgcgcgctgccacacctgactggttttcgtatttttttggtggagacggagtttcactgtgttggccgggctggtctccagctcctaatcaggagtgatccgccagcctcggcctcccgaggtgccgggattgtagacggagtctcgttcactcagtgctcaatgttgcccaggctggagtgcagtggcgtgatctcggctggctacaacctccacctcccagccgcctgccttggcctcccaaaatgccgagattgcagcctctgcccggccgccaccccgtctgggaagtgaggagcgtctctgcctggctgcccatggtctgggatgtgaggagcccctctgcccggctacccagtctgggaagtgaggagcacctcttcccggcaccatcccatctaggaagtgaggagcgtctcttcccgggcgccgatcgtctgagatgtggggagcgcctctgccccgccgccccgtctgggatgtgaggagcgcctctgcccggccgcgaccccgtctgggaggtgaggagcgtttctgcccggccgccccgtctgagaagtgaggagcccctctgcctggcagccaccccgtctgagaagtgaggagcccctccgcccggcagccgccccatctgggaagtgaggatcgtctccgcccggcagctgccccgtccaggaggtggggggcagcccccgcccggccagccgccccgtcccggagggaggtgggggccagcccccgcccggccagccgccccgacccggagggaggtgggggccagcccctgcccggccagccgccccgtccgggagggaggtggggggctcctctgcccggccgccgccccgtccaggaggtggggggcgcctctgcccggccaccccttctgggaagtgaggagcccctctgcccggccgccaccccatctggggaggtgtacccaacagctcattgagaacgggccatgatgacgacggcagttgtgttgaatagaaaagggagaaaagggggaaatgtggggaaaagatagagaaatcagattgttgctgtgtctgtgtagaaagaagtacacataggagactccattttgttctgtactaagaaaaattcttctgccttgggatgctgttgaccttacccccaacctggtgctctctgaaacatgtgctgtgtccactcagggttaaatggattaagggcggtgcaagatgcgctttgttaaacagatgcttgaaggcagcatgctcgttaagagtcatcaccattccctaatctcaagtacccagggacacaaacactgtggaaggccccagggtcctctgcctaggaaatccagagacctttgctcacttgtttatctgctgaccttccctccactattgtcctatgaccctgccaaatccccctctgtgagaaacacccaagaatgatcaataacaaaaaaaagaaaaaaaatgttattatattaagccctcttccttctaataaagtctatacaaatacacacatacaagcctgaaactactctaaataaaatatcaggtttttaaaatcccataaagaaacaagcaaacacaaaatcagccactttgattgaggagagagtgggatggagggggttaggaggctgcccgtatcacctccgggcggcatgtggaggagcagatggagtctaggaagaccctggggagtcacttgttctgactgggctttctcctagctcgacactttgctaaccatttcctgggaagagcttaggaaactcctgtgctctagtgaggcagagcctcccctcacagggtattggcaaggaggcattctgagactgtgattgagaagctagcacagtgcttgacaagtacctgtgggaactgtcatcctctgtaactatcatgtggccttggagtgttcagatggcctggcctggcctggggcttggtggagatgtttgagggtcagctgctttaggctcccactttctcctcaatcaaagtggctgtttttgtgtctctttatttatggaatttaaaaacctgatatataaatagaaagtgcagctggaggtgccgaggctcagtgtctagaactgtgctgcttgggcttgcttgctggcctgtggccaggtgaactctgggtgtgaggtgcttcccaccctggatctacgatccccactacctctcccaggccctgagtaaccaacacaaggcggtgctaaagagccggtgagtgacagccatgaagcccatcaaggaagatttgaatgctatctgggctagggctgtcaggggtaggaactatggtggccttgtcttatcatggccccacccacagatgtgactgcctgtgctgcttctccagcagccagctgtctgtggccctgagcctgtcgtaccatgcctgcttcctcatgctgttcatgtttaaaaaaaaaaaaatctgagatggcgctgctggatgtgagtgctggaaatggggcgccacctttgtcctagggaattaggagctgaccagatacctcctgagtgccccctataacaagtggggagtggtgttgcactaaatgatgtcccccctcctcccaccaccgaagatgtgtttgtattggttcaatgaatatacaatgcagagacctaaatgaagacacatgaatgggtgtatgtggacatcagcttgcagctgggaaacaggtgcctctcattctccccagcaagtgtggaaggtgtccatgcccatgagtgtatagatctggcctttttcttaatttgttcacaaccccaggtctgttctgagtgaatgatgtgcagatgagatttctcaggtcattggtatgtttgaccttgtggctgctgcttttgctgccactacccccaagcccaacctggcttaaagtccaggctttaggtcaaaaagacggagggcttcctgtgttctgggatgggaagttctcgatctgtggtaggactgggtgttggggtacactttagtttcgtgtaggatgtgagctgcagtggttttattaattgtgattgccctggcctggttgtagctccgggtggggagaaggaatcaacagtggtgtttccccagatatccatgtgcccagccctggccttcctgccctcagacccagaagtaagcaccaccacagactctgacttgcctccctactccccataccccagatgggaataccttgaaggctacaatctggaagtattattctcctcattttaaccagacccacataaacacacagtgtgggagtgagggtaggatgggttggggacctggggagaaccagagtggaatcataaatccttgggaaaagttaaagatacagaagtggtggtaacctctccatgaagcccagctccctacctgatttttgccacacagtccctcctacagacactgtagggtggctctgggggttgttggggatccctataggcctgggctgctctctgtccccacctgcctgtgctccttctctcttttgttgttgttgttgttgtttgtttgttttgttttgtttttcagatggcagtttcattcttgttgcccaggctggagtgcaatggcacgattttgactcactgcaacttctacctcctcggttcaaatgattctcctgcctcagcctcctgagtagctgggattacaggtgcacaccaccacacatggctaatttttgtatttttagtagagaagggttttcgccatgttgaccagcctcatctcaaactcctgacttcaggtgatccgcctgcctcagcttcccaaaatgctgagattacagctgtgagccaccacacccggcccctgtgctccttctctttgcctgctgtcagggccctaacgtggagaaggaggcaggtcctcagcctcaggtatagctgaatgtcttttggagtgtttgaagcatgctttatgtcttagaaattctaaaaagtaaaacgaattccaattgtaatgtctgttagttttcctgagccaactggaagaaaaggatttttcacctgaaatttttaaatgacacccaaggatagccaccagtgtcttggccatggaaacctcctatgtgcttcccacccctggtttgatttgcaacctcatgattgtgttgccctgaacatactttcctctggtgaatatggttcacatggttaacaccacttcatgagaggggggcatcatgtagagatgagaatggattgtctttagttaccattgtgcctctttgtcacctgagaggctcacttttcctggctgattccataagtgtgttagtgttgtcagacacctctggacaactcaaatgacaaggggctgttgttttataaaggaaacaaaggctttggatgtgaaatccttcttttctttttcccttcttttaggtgaaatacttcagtttttttcttaagggtaaacagtggtatcttagcaggtttagcgtaagaattggcatgtgctaggttgtggtttcagtgtggatgggcagttcccaagatggagaaccaggtctcactgaattgcaggagccacactttctctttttcatatcccccaccatgtgcacgtgtgtgtgtgtgtgtgtgtgtgtgtgtgtttacacatacaggtctcactctgtaacccaagctggagtgcagtggctgaatgatgggtcactgcagcttcaaactttcagtcttaagtgatcctcctgcctcagcctccccagtagctgggaccaccggcatgcaccagcctgcctggttctttttttttttttttggtatttttttaaagtagagacagagccttgccatgttgggtaggctggtcttgaactcccgagctcaagcaatccacccgcattggcttcccaatgtactgaactacagacataagccactgtgcccggcctagttttattatctgattacacaagtatatttcttcataacaattcactgagctttacttgaatgaagaatttcttcatgtatttctctatgcatgttacatatcaataaaaaattacatagtacatatttgcacaaaatgctaactcactatctcaaaataacagcagtaatttttttttgcttgtttcatggtgagacacactcagaacatgatcatacttctctgctatcatgacacacttatttcacagttttttatggctctacaaacaatagaaataaagaaggggtctcttgtgtgcacttatggggtatacttaaatgtagagaattttgcagccaacattatatatgaaaaaacttacaccttgataggtaaaagatgaagggccagcctgtgtgagaaatttttatgggatatttgttccctcacaatatcagaaacagaatattggtccactgctcttaacctacttcataagttaaggacaactttttcacaataagttaaggagcatttccaggatgcccttactcttctgaatggccatgatttgttaggtctttctttccatggtataaagtaaatgaggcaatggttagaaatgtatccccccaatagggctctatagaagattatactgtaaaggctatgattacacaatagattttaaatttacttactaaagttgtgctaaataatattatttcattctttctttttttttttttttgagatggactctcgctctgtcgcccaggctggagtgcagtggctcgatctcggctcactgcaagctccgcctcccaggttcacgccattctcctgcctcagcctcctgagtagctgggactacaggcgcccaccaccatgcctggctaatttttagcatttttactagagatggggtttcaccatgttagccaggacggtctcgatctcctgacctcgtgatccacctgtctcagcctcccaaagtgctgggattacaagcgtgagccactgcgcccagcaataatattatttcttttaattacttattggatgaacagagaagtacctatgaagttgctaacacttgtagttgcacatggagaaatacgtagtgtaggctccctgagcctactctgcatccacggagatgcagttgcagcggattaatgaacagtgtgcttggttgaaatgagtagaccacttatctagctaactattcggcctatttaattttagttggtgtttcgtggggaccctggctaaaaagcatgcttcaaactcttggtatcattctcctgatagttgaaatagtagtgtctccctacttcaccgtattctctcaaaagttataaatgtttgcatgcagtcatctccaaaatgtcaaatgatctcttttaaaccagaatggcagaaactcaaagacacatgtgactacgaagacaccataacctatgaatgacatgataaggacaaaaacccaaaataggacaggtgcggtgcctgtaacctcagcactttgggagactgaagtgggtggatcatgaggtcaggagtttgagacaagcctgggcaacatagtgaaaccccatctcttctaaaaatacaaaaattggcctgttgtggtggctcaggcctgtaatcccagcactttgggaggccgaggtgggtggatcatgaggtcaggagatggagaccatcctgggtaacacggtgaaaccctgtctgtactaaaaatacaaaaaattagccagccgtggtggcatgggcctgtagtcccagctactcggaaggctgaggtgggagaattgcttgaacccaggaggtggaggtagcagtgaactgagatagtgccactgcactccagcctggacaacaaagcgagatttcatcttaaaaaaaaaaaaaagacagaaaaaaagataatggaaacagagtggcactaaggccctgagttttggtcacaccgtgacctatgtgagagcttacaaatagggtaatttttttttttttttgagatggaatcttgttctgttgcccaggctggagtgcagtggtgcaatctcggctcaatgcaaactctgcctcacgggttcaagtgattcttctgcctcagcctcccgagtagctgggactacaggtgtgcaccaccacgcccggctaatttttgtatttttactagagacggggtttcaccatattggccaggatggtctggatctcctgaccttttgatccgccagcctcagcctcccaaagtgctgagattacagacctgagccactgagcccggcctggggtgaattttttaaacaaaattatttatggccatcatctggactgagcatgtgcactcttcccaaacagaccaaaacaaaacaaaatgagtcactcatgccaaaagtgagctaatcaaacctaaaatttaagaaaatagctagatcttagaccagtttttctttgggaggcggaggcgagtggatcacctgaggtcaggagttcgagaccagtctgaccaacatggagaaacccctgtctctactaaaaatacaaaattaaagccaggcgcggtgcctcatgcctgtaatcccagcactttgggaggctgaggtgggtggatcttatcaactttagcatccaggaaggagcataaaagattttaaaaagagagagagagcaaagaacacagaagaaaaaccacagcaactccctctaagtgctgttgaagccaactaaaagtggggctagaaaaaaaaacagaggaagaagcttgagtagtttcacgtactcgggaggccgaatggaaagaccacctgggcaagactgaggagatcgaggctgcagggaatcacaatcgcatccttctcctggacctgaagagtactgccactggtgaccgctttctggtctaccttagacatggcaagctggtggccaagtccaatgctcatggctgaagtctgtcttaacataaataaactaacaactaacagtaaatatttaacaataataagtaataacaaataataacaagacaaataagtgagagggaacacagataaaaggtaattaatgtcacaattaattgttgtctctctttctctgtctctctcttcctcaatctccatgtgtcacactttcacacccaggctggagtgcacgtgtgtggtcacagctcattgctgatcactcacctgcactccagccagaatgtgatacagtaggaagacctagctaaaaataataattttatatatatatatatatatatatatatatatatatatatcacgtcaatttcagcatgcagaaaggagcataagaaaataaaagagagagaaagagcaaagaagaaaggaaaaaaaaaaaaaccacagcaactcactgtaagtactgcggaagaaaactaaaagtggagctggaaaaaaaaaagaacagaggaggaaagtccaagtattttcaggtactctggaggccaagatggatgggacgaccacctgtgaaagaccagggagattaatatcgcagtgaatcacaattgcatccctctgccttacctgaacactactactggtgagagctatctggtagaccttagaagtggcaagctggcagccaagtccaatgctcgcagccaacatctgcctcaaaattaataaataaccgacagtaaataataagaaagaaatgataatggacaataatattaccaataaataaataagtgggagtgaacaaaaataaaaggtaattaaaatcacaattaactgtatctctctctgtctctatttctctgcctctctctgtctttctgttttagtctgggtctctgtctctctgtctttctgaatctctcttccctgatctccgtgtgtcacactgtcaaacccaggctggagtgaacgtgtgtggtcacagctcactgctgatcatgtacctgcactccagccagggtgtgacagactgagaagacctggctaaaaaaatatatgtgtatatataaaacatcaacttcagcatacaggaaagagcgtaaaaaaaaataaaataagagagagagagagaatgagagcaaagaacaaagaagaacaactatagcaactctctctaagtactgtggaagcaaactgaaagtggggttagaaataaaacagaggaacaatgtctgagtagtcccaggtactcgggaggccaagatgggaagaccacccgggtgagactggggagatccaggctgcagtgaatcgtcatcacatctctcttctggacctcaatggtaccactgccagcaagagccaaatggtcaaccttaaacatggcaagctggcggccaagtccaacactcgtggctgacatctgtctaaaatgtataaacaaataaacaaacaatattttttttttttgagctggagtttcgctcttgttgcccaggctggagtacagtggcgtgatcttggctcaccgcaacctctgcctcccaggttcaagtgattgtcctgcctcagcctccggagtagctgggattacaggcatgcgccaccacgcctggctaattttgtagttttagtagagttgatgtttcttcgtgttggtcaagctagtctgaaactcccgacctcagctggtttgcccgcctcggcctcccaaagtgctgggattacaggtgtgaaccacctcgcctggcacataaatatttaacaataacaaagaaataacaaacaatgataagaccaataaataaataagtgggagtgaacaaaggtaaaatgtaattaatataacaactaattgttgtctgcctccctgtctctctctgtttctgtctctctgccactgtctgtttgtgtctctgtctttctgtccctctctccatcgatctccatgtgtcacactctcacacacatgctggagggcaggggcatggtaacggctcactgctgatccagcacctacactccagccagggtgtgacagtgagaagacctaccaaaaatcaaatttaaacatccacgtcagcgttcaggaaggagggtaacaaaaaagaaaaaagaaatggagcaaagaacaaagaagaaagaccacagcaaccccctctaaataccgtggaaacaaaatgaaagtgggagtagaaaaaaaaaagaaggaagatggcctgagtagtccaaggtaaatgggaggctgagatgggaagtcctccgggtgacatcgggaagatcgttgctgcattgaatcatgatggcatccctctgctgggcctgaacaatactactgccagtgagagccatctggtcaaccttatcaccagcgagagccatctgtttgaccttagacatggcaagctggcaactaatccaacgctcgcagccaacatctgttacaaaataaatatacaaaaaaacccaatagtagatatttaacaataactaagaaataataggctgggcgtggtggctcatgcctgtaatcccagcactttgggaggccgagacgggcggatcacgaggtcaggagattcagaccatcctggctaacatggtgaaaccccgtctctactaaaaatacaaaaaattagctgggcatggtggcgggcacctgtagtcccagctacttgggaggctaaggcaggagaatggcatgaacctgggaggcagagcttgcagtgagccaagatcgagccactgccctccagcctgggtgacagagtgagactccgtctaaaaaaaaaaaagaaataataacaaataattttaaagaccaataaataaatgagagtgaaaaagggtaaaaggtaattaatatcacaattaagatcttctttatttttctctctctctgattgtcacactcatgctgcagtgtgtcaaaaaaaaatctaagaggtcaacttcagcatgcagaaaggaacatagaaaaatagagtgagaagaacaaagatttaacacaacagcaagtcactctaagtactgtggaagaaactgaaagtggggttagaaccaaaacagaggaagtaggtcctagtagtcccaggtacttgagaggctgagatgggaagactacccttgtgagaccaagatcgaggccacggtggatcataatcacatccctctgctggacctgaaacggtatggccaccagcgaggccatctggtcgacttcagacatggcaagctggcagctaagcccaacgctcatggtcaatgtccatcacaaaatatataaacaaaccaacagtaaatatttaacaatatcaaagaaataataacaacaaacattaaacaccagtaaataaataagtggaagtgaacaaaggtaaaaagtaattaatattacaattaagatcttcttcactctttttctctctttctctctcttcatttgtcacacccagctggagtgtgaccaaaaaatctaaaaggtaaactttttaaaaaatttttattattattatactttaagttttagggtacctgtgcacaatgtgcaggttagttacatatgtatacatgtgccatgctggtgtgctgcacccattaactcgtcatttagcattaggtgtatctcctaatgctatcctttccccctcctgccaccccacaacagtgcccagagtgtgatgttccccttcctgtgtccatgtgttctcattattcaattcccatctatgagtgagaacatgcggtgtttggttttttgtccttgtgatagtttactgagaataatgatttccaatttcatccatgtccctacaaaggacatgaattcatcattttttatggctgcatagtattccatggtgtatatgtgccacattttcttaatccagtctatcattgttggacatttgggttggttccaagtcttagctattgtgaatagtgctgcaataaatatatgtatgcatgtgtctttatagcagcatgatttataatcctttgggtatatacccagtaatgggatggctgggtcaaatggtaattctagttctagatccctgaggaatcgccacactgacttccacaatggttgaactagtttacagtcccaccaacagtgtaaaagtgttcctatttctccacatcctctccagcacctgttgtttcctgactttttaatgattgccattctaactggtgtgagatggtatctcattgtggttttgatttgcatttctctgattgccagtgatgatgagcattttttcatgtgtcttttggctgcataaatgtcttcttttgagaagtgtctgttcatatcctttgcccactttttgatggggttgtttttttcttgtaaatttgtttgagttcattgtagattctggatattagccctttgtcagatgagtaggttgcgaaaattttctcccattttgtaggttgcctgttcactctgatggtagtttcttttgctgtacagaagctctttagtttaattagatcccatttgtcaattttggcttttgttgccattactttcggtgttttagacatgaagtccttgcccatgcctatgtcctgaatggtaatgcctaggttttcttctagggcttttatggttttaggtctaacgtttaagtctttaatccatcttgaattaatttttgtataaggtgtaaggaagggatccagtttcagctttctacatatggctagccagttttcccagcaccatttactaaatagggaatcctttccccattgcttgtttttctcaggtttgtcaaagatcagatagttgtagataagcggcattatttctgagggctctgttctgttccattgatctatatctctgttttggtaccaataccatgctgttttggttactgtagccttgtagtatagtttgaagtcaggtagtgtgatgcctccagctttgttcttttggcttaggattgacttggtgatgtggtctcttttttggttccatatgaactttaaagtggttttttccaattctgtgaagaaagtcattggtagcttgatggggatggcattgaatctataaattaccttgggcagcatggccattttcacaatattgattcttcctacccatgagcatggaatgttcttccatttctttgtatcctcttttatttcattgagcagtggtttgtagttctccttgaagaggtccttcacgtcccttgtaagttggattcctaagtattttattctctttgaagcaattgtgaatgggagttcactcatgatttggctctctgtttgtctgttattggtgtataagaatgcttgtgatttttgtacattgattttgtatcctgagactttgctgaagttgcttatcagcttaaggagattttgggctgagacaatggggttttctagatatagaatcatgtcatctgcaaacagggacaatttgacttcctcttttcctaattgaataccctttatttccttctcctgcctaattgccctggccagaacttccaacactatgttgaatagtagtggtgagagagggtatccctgtcttgtgccagttttcaaagggaatgcttccagtttttgcccattcagtatgattttggctgtgggtttgtcatagatagctgttattattttgagatatgtcccatcaatacctaatttattgagagtttttagcatgaagggttgttgaattttgtcaaaggccttttctgcatctattgagataatcatgtggtttttgtctttggttctgtttatgtgctggattacatttattgatttgcatatattgaaccagccttgcatcccagggatgaagcccacttgatcatggtggataagctttttgatgtgctgctggattgggtttgccagtattttattgaggatttttgcatcagtgttcatcaaggatattggtctaaaattctcttttttagttgtgtctctgcccggctttggtatcaggatgatgctggcctcataaaatgagttagggaggattccctctttttctattgattggaatagtttcagaaggaatggtaccagttcctccttgtgtctgtggtagaattcagctgtgaatccatctggtcctggactctttttggttggtaagctattgattattgccacaatttgagatcctgttattggtctattcagagattcagcttcttcctggtttagtcttgggagagtgtatgtgtcgaggaatttatccatttcttctagattttctagtttatttgcgtagaggtgtttgtagtattctctgatggtagtttgtatttctgtgggatcggtggtgatatcccctttatcattttttattgcgtctatttgattcttctctctttttttctttattagtcttgctagaggtctatcaattttgttgatcctttcaaaaatccagctcctggattcattaattttttgaagggttttctgtgtctctatttccttcagttctgctctgattttagttatttcttgccttctgctagcttttgaatgtgtttgctcttgcttctttagttgttttaattgtgatgttagggtgtcaattttggatctttcctgctttctcttgtgggcatttagtgctataaatttccctctacacactgctttgaatgtgtcccagagattctggtatgttgtgtctttgttctcgttggtttcaaagaacatctttatttctgccttcatttcgttatgtacccagtagtcattcaggagcaggttgttcagtttccatgtacttgagtggttttgagtgagtttcttaatcctgagttctagtttgattgcactgtggtctgagagacagtttgttttaatttctgttcttttacatttgctgaggagagctttacttccaactatgtggtcaattttggaataggtgtagtgtggtgctgaaaaaaatgtatattctattgatttggggtggagagtcctgaggatgtctattaggtctgcttggtgcagagctgagttcaattcctgggtatccttgttaactttctgtctcattgatctgtctaatgttgacagtggggtgttaaagtctcccattattaatgtgtgggagtctaagtctctttgtaggtcactcaggacttgctttatgaatctgggtgctcctgtattgggtgcatatatatttaggatagttcactcttcttgttgaattgatccctttaccattatgtaatggccttctttgtctcttttgatctttgttggtttaaagtctgtcttatcagagactaggattgcaacccctgcctttttttgttttccatttgcttggtagatcttcctccatccttttattttgagtctatgtgtgtctctgcacgtgagatgggtctcctgtatgcagcacactaatgagtcttgactctttatccaatttgccagtctgtgtcttttaattggagcacttagtccatttacatttaaagttaatattgttatgtgtgaatttgatcctgtcattatgatgttagctgtttattttgcttgttagttgatgtagtttcttcctagtcttgatggtctttacattttggcatgattttgcagtggctggtactggttgttcctttccatgtttagtgcttccttcaggagctcttttagggcaggcctggtggtgacaaaatctctcagcatttgcttgtctgtaaagtgttttatttctccttcacttgtgaagcttagtttggctggatatgaaattctgggttgaaaattcttttctttaagaatgttgaatattggcccccactctcttctgcgttgtagagtttctgctgagagatccgctgttagtctggtgggcttccctttgtgggtaacccgacctctctctctggctgcccttaacattttttccttcatttcaactttggtgaatctgacagttatgtgtcttagagttgctcttctcaaggagtatctttgtggcatcctctgtatttcctgaatctgaatgttggcctgccttgctagattggggaagttctcctggataatatcctgcagggtgtcttccaacttggttccattctccccatcacttttaggtacaccaatcagatgcagatttggtcttttcacatagtcccatgtttcttggaggctttgttcatttctttttattcttctttctctaaacttcccttcttgcttcatttcattcatttcatcttccatcactgataccctttcttccagttgaatgcatcggttcctgaggcttctgcattcttcacgtagttctcgagccttggctttcagctccatcagctcctttaagcacttctctgtattggttattctagttatacattcgtctaaatttttttcaaagttttcaacttctttgcctttggtttgaatttcctcctgtagctcggagtggtttgattgtctgaagccttcttctctcaacttgtcaaagtcattctctgtccagctttgttccattgctggtgaggaactgcttcctttggaggaggagaggtgctctgctttttagagtttccagtttttctgctctgttttttccccatctttgtggttttatctacttttggtctttgatgatggtgatgtacagatgggtttttggtgtggatgtcctttctgtttgttagttttccttttaacagacaggaccctcagctgcaggtctgttggagtttgctagaggtccactccagaccctgtttgcctgggtatcagcagcggtgtctgcagaactgtggatttttgtgaaccgcgaatgctgctgtctgatcattcctctggaagttttgtctcagaggagtacccggccgtgtgatgtgtcagtctgcccctagtggggggtgcctcccagttaggctgctcgggggtcaggggtcagggacccacttgaggaggcagtctgcccattctcagatctccagctgtgtgctgggagaaccactgctctcttcaaagctgtcagacagggatatttaagtctgcagaggttactgctgtcttttggtttgtctgtgccctgcccccagaggtgaagcctacagaggcaggcagacctccttgagatgtggtgggctccacctagttcgagcttcccagctgctttgtttacctaagcgagcctgggcaatggtgggtgcccctcccccagcctcgctgccaccttgcagtttgatctcagactgctgtgctagcaatcagcgagcctccatgggcgtaggaccctccgagccaggtgcgggatataatctcctggtgcgccgtttcctaagcccattggaaaagtgcagtattagggtgggagtgactcgattttccaggtgccgtctgtcacccttttccttgaccaggaaagggaactccctgaccccttgtgcttcctgagtgaggcaatgcctcgccctgctttggctcacgcatggtgcactgcacccactgtcctgtgcccactgtctggcactccctagtgagatgaacctggtacctcagatggaaatgcagaaatcacccgtcttctgcgtcgctcacgctgggagctgtagaccggagctcttcctattcggccatcttggctcctcccaccctaaaaggtaaacttaagcgtgtagaaagctacgtaggaaaagagagagagaaaagaaaaaaaaaagcaaaaggacagcaagtcattctaagtactctggaaaaaaactgaaagtggggttagaaaaaaaataggaagaaggtctcagtagtcccaggtactcaaggaggccaagatgggaagaccacccgggtgagactggggagatgaaggctgcagtggatcacagttgcatccctctgctggacctgaacggtactgccacaggtgagagccatctagtgaaacttagacatggcaagctggcagctaagtccaagggtcatgggtggcatcggtctcaaaattaataaacaaaaataccaacagtaaaaaaaaattaacaataacaaagaaataacaaacaatattaaggaccaaaagtaaataagtgggagcgaaaaaaaaggtaattaatatcacaattaagatcttctctctctgtctctctccttttgtcacatccaggctgaagtgtgacaaatgaaaaataacctaaaaattcaactgcaatgtgcatgaaagaccataggaaaataaagaaaagaacaaacaagaaaaacaacagcaagtcactctaagtactgtggaacaaattgaaagtggggttagtctgtaatattgtttgttattctttctttattattgttaaatatttactgttgggtttttaaatttattttgagactgatatcagcctcaaggcttggacttagcttccagcttaccatctttaaggctgaccagatgactctcgctatgccatgtctaaggttgactggatggctcttgctggaggtagtaccattcaagtccagcagagggatgccatcgtaattcactgtggcctcatctctctggtcccacccaggtgatcttcccatctcagcctaccgagtacctgggactactcggaccttcttcctctgttttttttttttttttcctaaacacacttccagtttgtttccacaatacttagagtgacttgttgttgtttatcttctttgttcttttgtctctctattctcctatgctccttcctgtatgctgaagctaatctttgttttttttttttttttttggtcacactctagactgggtgtgacaaagagacagagagagagagtgtgtgtgtgtgagagagagaaaataaatcttaattgtggtactaattaccttttacctttgttcactcccatttatttatttattggtctttaatatggtttgttattttttgttatcgttatatatttactgtaggtttttaaatatattttgagacagatgtcggttgcaagcattggacttagctgccagcttttcatgtccaaggtcgaccagatggctctggccttgccatgtctaaggtcatccatatgactcttgccagtggcagtaccgttccggtccagcaggaagatacgatcatgattcactgtggcccttgacctccctggtcttgcccaggtggtctacccatctctgcctcttgaatatctggggctactcgaaccttcttcccctgtttttttctaacctcactttcagtttctttccacagtacatagagtgatttgctgttgtttttcttctttgttcttttctcccagtattttcctacactccttcctgcatgccgaggttgacgttttgttgtgtgactacctggataagactggaaagatcaaggctgcagtgaatcaggattgcatccctctgctggagctgaatgggactgctgctgacaagagccatatggttaaccttagacagcaaaacgtgagccatctggaggaccttagacatggcaaggcaagagccatctggtcgaccatagacatagcaatctggtggctaagtccaatgcttacagccaacagctgtctcaaaataaataaacaaaaaacccaacagtaaatatttaacaataacaaagaaataataacaaacaatattaaagaaaataaataaggaggagtgaaaaaggtagagtacaataaatatcacaatgaagattttctcctctctctttctctccatttgtgacacccaggctggagtgtgacaaaaaaaaaaaaagaaagaaagaaaagaaaataggttaacttcagcttacaggaagaagtgtaggaaaatagagaaaagaacaaagaagaaaaacaatagcaagtcactataagtactgtggaaataaactgaaagtgggttgagaaaaaaacaaacaaacaaacaaaaacagaaaaagaagttctgagtagtcccgggtacttgggaggctgagatgagaagaacacgcaggtgtgaccagggagattgaggctgcagtgaatcacgatcacatccttctgctggaactgaacagtactgctaccagtgagagccatgtggtgaatcttcgacatggtaagggaagagccatctggttgacctaatacatgtcagggtgagaaccatctggtcaaccttagacatggcaagctggcagctaaatccaatgctcactgccaatgtctctcaaaataaataaacaaaaaaagtaaatatttaacaataacaaagaaatgataacaatattaaacaccaataaataaatgagagttaacaaaggtaattaatatcacaattaagatctttctctctctctcctctgtgtgtgtgtctctcccctttgtcacacccaggctagagtgtgataaaaaaatatttaaaaggtcaacttcactgaggaggaaggagcataggaaaacacagaaaagagcaaagaagaaaaacaacagcaggtcactgtaagtactttggaaacaaactatcagtagggttagataaaaaacagaggaagaaggttgtttcaggtacacgggaggccaagatggatagatcacccaggtgagactgggaacattgaggtcacagtgaatcacgatcgcatccctctgctgcacataaactgtactgtcaccagcgagagccatctgctcgaccttatacatagcaaggcaagagatacctagttgaccttagacatggcaagctggcagctaagtccaatgcttgtggctgagatctgtcaaaaaataaatacacaaaaaacaacagtaaatatttaacaataaagaaatagtaacatacaatattattgaccaataaataagtggaagtgaacaataataaaaggtaattaatatcacaattaagatctcttttctctttctccctgtatgtcacacccaggctacagtgtgataaaaaaatctaaaagtcaacctcagtgtgcaggaaggagtgtaggaaaatactgagagaaaagaacaaagaagaaaaacaacagcaaatcactctatgtactgtggaaagaaactgaaaatggggttggaaaaaacagaggaagaaggtccgagtagtcccaggtattcaaggggccgagatgggttgaccacctgggcaagaccggggaagtgaaggccagagtgaatcaccattgtatcctcctgctggacctgaacggtactgccactggtgaaaatcatatggacgatcttagacatggcaaggcgagagccatctggtcaaccttagacatggaaagctggaggctaagtccaacgcttgcgactgacatctgtctcaaaataaatttaaaaacctacagtaaatacataacaacaaaaaaaattaaagaccaataaataaataaatgggagtgaacaaaggtaaaaggtaattagtgtcaaaattaacatttattttcacacacacacacacacacacacacacactctctgtctctttgtcacacccagtctggagtgtgaccaaaaaaaacaaaccaaaaggtcagcttcagcgtacaggaaggagcataggagaatagaaagaaaaaagaacaaagaagataaacaacaacaagtcactcttaagtattgtggaaacaaactggaagtgtgtttaggaaaaaaacagaggaagaaggtccgagtagtcccaggtactggtaggctgagatgggaagatcacctgggtggaaccagggagatcaaggacgcagagattcacaatcgcatccctctgctggacctgaatggtactacctccagcgacagccatccagtcgaccttagatatggcaaagcgagagtcatctggtcagccttaaagatggtaagctggaagctaagtccgaggctcgaggccgatatcagtctcaaaataaataaacaaaaaaacccaacagtaaatatttaacaataacaaagaataacaaccaatattacagaccaataaagtgggagtgaacaatggtataaggtaattaatatcacaattgagatcttctcctttcctctctcttttttctctctctctctctcttttttccatttgtcacaccgaggctggagtgtgacaaaaaataaaatctaaaacttcaatttcaatgtccaggaaggagctaaggaaaatagagaaaagaacaaagaagagaaacaacaacaaatcactctaagtactatggaaacaatctgaaagtggggttagagaacaaacagaagaagaaaatgcgagtactcccacgtactactcggaaggccaagatgggtagaccacctgggcaagaccggggagatggaggccacagtgaatcacgattgcatccctctgctggacctgtgtggtactaccgccggcaagagccacctggtcgactttagacaatgcaagctgttggctaagtccaacacttgcgaccaacatctgtctcaaaataaatttaaacaccaacagtgaatatataacaataacaaaaaatagcaaacagtatgaaagaccaataaataaatgagtgaacaaaggtaaaagataattaatattacaattaagaccttctccccttactctcattttttctctctctctctttctctccctgtttgtcacactcaggctcgagtgtgacaaaaaaataaaccaaaaggtcaacttcagcatgcaggatggagcataaaagaatagtttgcgggttagggctcagaaatggaaggaaggctgggaaatgcaggaccacaagaaatgaaaagctgtgttcattctcccctggtgaccctatgctcagcagggactagcagaaactgagggttttgtgatttgaaagggaggatgagtccagccacatacccctggctgttacctaatgtgtgggcttcactaacattagatagtaatttggggaaaagagtagaaatagatcatttgtttgtctccatgtaattttttttttttaagacaaagtctcactctgtcacccaggcaggagtacaatagtgcaatcttggcacactgcaacctctgcctctggggctcaagcaattatcctgcctcagcctcccaagtagctggaactacaggcgaatgccaccgtgcccagctaatttttatatttttgtagagacggtgtctcaccatgttccccaggtgattcaccctcttctgcctcccaaagtgagctcaggtgattcaccctcttctgcctcccaaagtgctgagccacaatgcccagacttcatataagagttttcagtgtgagttttttttttcttctactggtcagcatagaaccttttttcaacatgtgagtttcttcctaattactggattgtggcaccaaaaaaaaggcatatttgaagttctaaatgtcatattatacattgtgaagtgacttctcaggactgatcttatctaagaaagaagtctggagaaagagagaaaagaaagagacatgaagaatggcaatatcaacccaggtgatagtcattcttggttgattatcttcttaatgcagtgctgtgtttagcactgactaacctttgattctgcagtctcctacctgacacattggcttgcactcacccaggaccttacctcagtctcctcccatctttatttaactgtcatttcatgaaatggcacttgtgaaaaggctctgtatagattgtcttgggcaaagcttcactccagacctagattgaggacacggagtgggctctgtgggttcagtagagttgagctgcagggattgtttaggggccacatctggaggtaccatctgctttctctgaaccaaaattaaacaaaatgcacatgtaatggtgcattaatatccaggaagacctggggaatcttagacaacaaatattgataccaaaaaactggctaagtttgacttcataatgcatttgaagctaacccaagtgaattagtgctgtttgagcctcaaagtagaatccataaaactctacaattacaaatataagccaattccatctttaaattaaatttgttgtaggttgtgccttgtctgaaaaagtaactcttctgttccagaaactgaccactgccaaaaccatgcataaggtgtgaaataattactaactcataggctgaaattgtggaaagaatataatatcaagaacataagccattccataactgatcataatttaatataatgtaattctcagtggtcctcattgttgctttgtgatgtataaagatatggaatatgttttatgaaaagttcttcaatacattttgactattaatccgctaactcttattttctctacaagagtcaggaatgactccaagattagtagatatatttctccaataccttcatgcatataaagtgcatagaatgtagctgattgaattatcttattcttttcaaaaatattaaatgtaggttttttgttgtgttattttacctgctagggcatattatatacttaagaaagatcataattggatggcgacagaaaacatctggtctttgtcaattatgataagactatttgcttcattaaatcagggaaggaggattcaaggaaaggtaacttgatgaccttaatgttttcacattagaaaaaaaaaagcatggatttcaattgttttcagaattgaatagtttgtgacatttcttcttggtttaaaaatattctaaagccgcagcctggccaacatagtgaaagcccatctctactaaaaatgcaaaaattagccgggcatggtggcatgtgcctgtagtcccagctacttgggaggctgaggcaggagaatcacttgaacctaagaggcggaggttgtggtgagccaagatcgtgccactgcattctagcttgggcaacagagggagactccgtctcaaagaaaaaaaaaattctaaacccttgccaggcttaatattcaactatttcaattatttaagtaaataagtatctgtgcctccagttttcctctccaaaatggatttgttttaatatatttaatgattctaacattgaaataactttatttgatgttttcattcactaaaaatacaattttccctgtaataaatggttagatttaatttggttagatttaaatgagatcgctacaatcaaaactcttttaaagtacaaatatattttataactgacaaatatgcaaaattaaaaataacaaatttgtgacatattaaagtgtatctgtgtctgtaagattgagaaacatagtggataagcacattgtctacacctgaaactttctttttacaatgaggtgactttagaaatgtcattcagccttcttttgtttaatatctccttacctgtaaaaagggaacaataaagcacattgtagatgtatgataaaaatacatgtaaaacctgttatagtattctagagtagtgttatagtatagtgggaatatatatgtttttctctttagaacaaaagtattgtgaaataaaagtttcaataaaatatttctgagttggatacaatgggaagtacacagtagaatgtttctattttctccataaaacagacctcatctgtccatgaaagatctcctcacgtggaaatgaaattatcagttacttgaaaatatcagattgtctccagtaatatagcagtaggaatgatcttatctcagaccatagttaaatagttggattttttttcttccttgacatcagattttctttaattaccagatgcacattgtgatacacagatttgactctcaagcacctatggccaactccttggtactctccaaaaaggtcccttagacaatgactgatttggagttgaaatattttttcagtaatattagatagaaagttgttttctgtattcacagagtggccacagcatgtgcattggcaccatctgcctcttgagtatctcccaggtcatcaccatcagcccccaaaacctcaggtgaacgtagcttaaactacatgcttccaaatatatttgaatctctaatatccaaattatgtgctgaattctgaataggcttgtaaatgtcattttttcctgtgtatgttactggtaagtggaacaccataaagaacacaaagattattttaaacactgttctggagtagttaataacagaattccacatttatgacatgtcatgtttttatcattttttagtgttttgtgtttggaaattataacctgggccaacagctccatgacctttattctgttcaacacaagtggtgggtccaacatattcataggtccaacaccactcctaaattctcacatgagtccagagtcacccaaagcatctttgtcctaaaggagcacctttgtatcattttacactctctcctacatcttttcagtatatatggttattttgtataattcaaattgttggcttatgaacaactctaaactgattaccgcttgtttttttctatagtcaggcccattgttctcctaagccatgaccccaggataaacagtataacctcttcatgctgtggaaggaatatacagtttcctaagataatcagatagatctacattttatgtggaattattttttaaatgtgcagacatgtattcattattttatgcagaggttaaattcccacaaagagcagtcacatatcagagaacctgtgaatcacagactgagtccctgccctcatagaatttattgtatggtagcaatgacagttacagactaaatgttttgaatagttttttgataattttctatttactaaatgttataataaagaaatgtagaggccaaaaatttatcttaaaattgggcctctaataatttagacaatggaaagcttatatggttatgtagctttaaactaattaagttaaaatgtcatagatggctcataggtacatcaagatggtagaatggaaggcttcgccaaccatcccccctgcaaggacaccaatttaacaatgacctacatttaaaaagcaccttcgtaagaaccaaaagtcaggtgagcactcatggtacctggttttaacttcatattgctgaaagaggcactgaacgggtaggaataacagtcttgaatcttttacactatttttcccacatcccccaacaatggtggcatggtgcagaaagggagagttcagcaattgtgaggcattgaattcagtgctttcctgttataacggaaagaaaaagcaaaccaaactcggctaacacttgctgatggaggaattatttaaaccatatagttaaatacagttgctggtgatagtaagtacacagaaaattaaataatattataacaccgtaactgtggtgtgtgaactacttttatgcaaggtagaaagactaaacaataaaccaatcaaaaataacaactgcaacaacttttcaagacatagacagtaaaattacatataaatagaaacaacaaaaactgagggaagagatttaaagcatacagtttttattattctttttgcttctttgtttattcaaacagtgttaagttgttattagattaaaataatagattacaagatagcatttgcaagcttcatggtaacctcaaaccaaaaaacatacaagaatacacaaaaaataaaaagcacaaaactaagtcacatcaccagagaaaactaccttcaataaaaggaagacaaaaagcaaagaaagataaaagagaagacctccttcactaaaaggaagacaaaaagcaaagaaagataaaaaagaccccaaagcaaccataaaacaaataaaatggcagaagtaaggttttgcttatcaataataacattgaatgtaaatggactaaactcgccaatcaagacagagtggatgaatgtatataaaaacaagacatattgatcctttgcctgtaagaaattcacctcatctataaagacatacatagactaaaaattttagaaatggaaaaagatattcaatgtcaattaaaaaaatgcagtagtagctatacttacatcagaaaaatagatttttagacaaaatttataaggaaagacaaagagggctgggtgcggtggctcacacctgtaatcccagcactttgggaggccaaagtgtgtgggtcacgaggtcaggagttcgagaccaacctggccaatatggtgaaatcccatctctactaaagctacaaaaattatttggtcgtggtggcatgcacctgtagtccgagctgcttgggaggctgaggcaggagacttgcttgaacctgggaggtggaggttgcagtgagctgagattatgccactgcacttcaagagcaagactccatctcaaaaaaaaaaaaaaaaaaaaaaaaagacagagaggttactatgtaatcataaaggggtaaatttaacaagagggtataacaattttaaatataaatacaaccaactcttgagcactgaaatatataaagcaaatattattagagcctgagagagatagactctaatacaataataggtggagactccaaaaacccactttcagcattgaatagatgttacagatattccagacacattatcaacaaagaaacattggacttaatctgttgcactatagaccaaatgtacctagtaaatatttacaggacattttatctaatggttgcagaatgcattcttttctttagcacatggattattttcaaggatagactatatgttaggtcacaaaaaagtcctaaaacattcaaaaactagaaataatatcaaacatcttatttgtccacaatggaataaaattataaattaataagaagaggaattataaaaactatacaaatacacaaaaataaacaatatgcttctgagtgattattgggtccatgaagaaattaagaagaaaattaaaaatgttcttgaaacaaatgataataaaagcactgtgtatcaaaatctatgggatacacaaaagcagtactaacaggaatgtttataggtataagtgactacatcccaaaaatgggaacattttcaaataaacaacctaataatgtatcttaaagaactagaggccgggcgcggtggctcacgcctgtaatcccagcactttgggaggccgaggcgggcgaatcacgaggtcaggagatcgagaccatcccggctaaaacggtgaaaccccgtctctactaaaaatacaaaaaattagccgggcgtagtggcgggcgcctgtagtcccagctacttgggaggctgaggcaggagaatggcatgaacccaggaggcggagcttgcagtgagccgagatcccgccactgcactccagcctgggcgacagagcgagactccgcctcaaaaaaaaaaaaaaaaaaaaaaaagaactagaaaagcaagaacaaaccaaacccacagttattagaagaaaaaaatcataaagattagagcagaaatcaatgaaaaaatttggcttttttgaaaagttaaaaattgacaaaccttcagcagactaaacaaaattttaaaatccaaatttaaaacaatttaacaaacaaaaaaataaactaagaaacaagagggcaagttagtgaggcctacaggctccaggacaatgtaagagatctcagaagcctcccatgctttcttgtttgcctccgctgttctgaggtatccagttaactcacaagactccatcatcccagcctggaaaatgactctggttccacttccaaaaaagaaccccaaagctatgacagggatggccttcagatcagtgataggatgctctgccatgttctatactaagctgagtgctcagtcccacaaaccgccaggccaatttttgctctgaaaaacctccagaggataatagagaaatttctaaggatctgagagtagagtgggtaactgatagacagcaaggtcaactcacctttttaagcctttgaaatttagaggccactcaggtcaattacttcaatttacagagaaaaaagtttgaggttttcactactgtattcccctccatactgggtgtagggggattcctcccggttttaattacagagagcagtgaatgcagaagccaagtttttgtcctctgaaagctttcctggggatggccacagcccaggcagatccatgggaaccttgaagttcccaagtcatcagttataggtcctggacatgttaccaggagactgggtgcccctaccccatggcaaagctgccgccatcctctgtcttctttcttctcgtcactccatcagtgttaactcttcctttaacctgagaagtctgtgtgtgtgtgtgtgtctgtgtgtgcacacgtgcatgcaaaactgtgcaggtttaatgatgcagacatgagtttgctgcatatgagaaaattggcagaaattctcaggatctcagggactctcattcctaaagcaaaccccattataaggatgaaccttggcctatgaggtcagaatgctcttttatcctctggactctgccaactttatgttctctgggccattctctgcttctctccagacttcaatttcccagttatccagtgagatgttagatgtcaaagtgcttaaaccacagctcagcctgcacatggtgcaagttccctaccaactaggatgggtgtagcagagctgtgatgagggtgtgcccagatcttcctcacttgggcagaaatagatgggttctgcactgggcagctggaccttctgtccaaaaagtcatgcacacaggatccttcaaggcccacagacaatgtgtgcatgtgggacccacctttatcccccagcagctcccactggagcatacccaatatgtcccctgtcctctgcatctagaaagtggtgacatccacacttaacacacggactgataagccctttgtggtggagtagtcctacaaaaagaatctgagatgctattactgtacaaggaattatggaggtgggccatatagaagcactagaacttcagaattaaatctccccactcctgcctccaccactatgcagataagaaaatgtcttaagaaagagacatgtcttaccgaagattaccagggattccatgtcaaagctagcactttggttaggattacatttgcctacaagtagaaggatacccaatataatagtagtgcagacaaaagacagaatgctttctttctgataaataagaatcttagagctggacagtccatgctgactctggactgtgcaccaaggcagtcaaaaataatctatctttttgctacaactttttttctaacttttaagttcaggggtacatgtgcaggatgtgcagctttgttacataggtaaatatgtgtcataaagattggttgtatacattgttttatcacccaggtattaagcctactatccattagttattttttctgcttctctccctcctcccactctccacctcatgatatgccccagtgcatgttgttccttctgtgtgttctcatcatctagctcccacttgtaagtgagaaaatgtggtatttggtttccttttcctgcattagtttgctaaagataatggcctccaacttcttccatgtctaaaaaggacatgatcttggtttttttttttaatggctgcatagtattctgtggtgtatatgtactacattttctgcatccagtctatcattgatgaacacgtgggttgatttaatgtatttgctattgtgaataggtctgcaatgaatgtgtgtgtgcatgtgtctttataatagaatgactttataatagaatgacatattcatttgggtatatactcagtgatgaaattgctgggttgaattttatttctgtctttaggtctttgaggaatcatcacactgtcttccacaatggttgaactcatttacactcccaccaacagggtaaaaacgttcctttttctccaaagttttaccagcatatgttattttttgactttttaataatagccattttgactggtataaaacaatatctcattgtggtttggatttgcatttctctaatgatcagtgatgttgaggttttttcatatgcttttttagctgcatgtatgtcttcttttgagaagtgtctctttttgtcttttgctcactttttaatggggttgtttacttttttcttgtaaatttaagttcttacagatgctggaaattaaatctttgtcagatgcatagtttgcaaaaattttctcccattctgtacgtggtctgcttactatgctgatagtttttgttttttcttttcttttctttttttctttcctttttttttttttttgctgtgcagaagctctttagtttacttagatcccattcatcaatatttcctttgttttaattgcttttggcatcttcatcataaaacatttgcccatgtgtatgtcctgaattgtattgcctaggttatcttccaaagtttttatagtttggggttttacattttagtctttaaaccatcttgagttgattattgtatatgctgtaaggaaggagttcagtttctttttttaaattttactttaagttacaggatacaagtgcagaatgtgcaggtttgttacataggtatacatatgccatggtggtttgctgcacctatcaacccattatctaggttttaagccatgcatgcattagctttttgtccttatgctctccctctcctcacctcccatcctccgactagccctagtgtatgttgttcccctccctgtgtccatgtgttatcattgttcaactcccacttacaagtgaggacacgtggtgtttggttttctgatcttatgttagtttgctgaagatgatggaggaagagagtccgtttcaattttctgcctatggctagccagttatcccagcaccatttattcaatggggtgtccttttcccattgcttgtttttgtcagttttgccaaaaatcagatagttgtagccatgtggtcttatttctgggttctctattctgttttattggtctgtgtgtctcttcttgtaccagtaccatgcctttttggttactatagccccgtagcatagtttgaagttgggtagcatgatatcttcagctttgttatttttgcttaggattgtcttgagtattcaggctcttgtttgtttcaatatataatttttttaattatactttaagttcttgggtacgtgtgcagaacgtgcagttttgttacataggtatatatgtgccatgctggctcactgcacctagcaaccagtcacttacattaggtatatctcctgatgttatcccttccctagcccccgacagcctgacaggccccagtgtgtgatgttcttctcattatgtccatgtattctcattgttcaactcccacttatgagtgagaacatgagctgtttgattttctattcttgtgatagtttgctgagaatgatggtttccagcttcatccacgtctctgcaaaagaaatgaactcatccttttttatggctgcatagtatttcatggtgtatatgtgccacattttctttacctagtctattattgatggacatttgggttgtttctgagtctttgctattctgaatagtgctgcagtatatgtgtgcatgtgtctctatagtaggatgatttataatcctttggttatatacccagtaatgggattcctgggtcaaatggtatttctagttctagatccttggggaattgccacactgtcttccacaatggttgaactaatttacactcccaccaacagtgtaaaagcatccctatttctccacatcctctccagcatctgttgtttcctgactttttaatgatcaccattctaactggcatgagatggtatctcattgtggttttcatttgcatttctctaatgaccagtgatgatgggcattttttcatacgtctgttggctgcataaatgtcttcttttgagaagtgtctgttcatatcctttgcccactttttgatggttttttttttcttataaatttgtttaagttctttgtagattctggatattagccctttgtcagatagatagatggcaaaaattttctccctttctgtgggtggccttttcaccctgatgatagtttcttttgctgtgctgaagctctttagtttaattagatctcatttgtcaattttggcttttgttgccattgcttttggtgtattaaacatggagtttttgcccatgcctatgtcctgaatggtattgcccaggttttcttctaggatttttatggtcctaggttttatgtttaagtctttgatccatcttgagttgatttttgtataagatataaggaaggggtccagtttcagttttctgcatatggctagccagttttcccaacaccatttattaaatagggaatcttttcctcattgcttgcttttgtcaggtttgtcaaagaccagatgattgtaaatgtgtggcattatttctgaggcctctgttctgttccattggtctatatatctgttttggtaccagtaccatgctgttttggttactgtagacttgtagtatggtttgaagtcagatagcatgatgcctccaggtttgttcttcttgcccaggagtgtcttggctatgtgggatctttttttggttccatatgaagtttaaagtagctgtttacaattctgtgaagaaagtcagtggtagcttgatagggatagcgttgaatctataaattactttgggcagtatggcagttttcaagatattgactctctctatccataagcatggaatatttttgcatttatttatgtcctctctaatttccttgagcagtggtttgtagttctccttgaagaggtccttcacatgccttgtaagttgtattcctaggtattttattatctttgtaacaattgtgaatgggagttcactcatgatttggctgtcagtttgtctgttattggtatatagaaatgcttgtgatttttgcatattgattttgtatcctgaaactttgctgaagttgtttatcagcttacagagattttgggcagagacaatggggttttctaaatagaaaatcatgtcatctgcaaacagagagaatttgacttcctctcttcctatttgaatatctttatttgtttctcttacctgattgccctggccagaacttccaacactatgttgaatagtagtggtgagagagggtatacttgtcttgtgccagttttcaaagggaatgcttccagtttttgtccattcagtatgatattggctgtgggttagtcataaacagctcttattattttgagatacgttccatcaatacctaatttattgagagtttttatcttgaaggggtgttgaattttgtcaaaggccttttctgcatctattgagataatcatgtggtttttgtctttggttctgtttatatgatggattacgtttattgatttgtgtatgttgaaccagccttacatcccagggatgaagcccacttgatcatggtggataagctttttgatgtgctgctggattgggtttgccagtattttattgaggatttttgcattgatgttcacctgggatattggtctaaaattctctttttttgttgtgtctctaccaggctttggtgtcaggatgatgctggcctcataaaatgagttagggaggattccttctttctctattgattggaatagtttcagaaggaatggtaccagctccgccttgtacctctggtagaattcggctgtgaatccgtctggtcctggactttttttggttggtaggcgattaattattgcctcaatttcagagcctgttattggtctattcagggattcaacttcttcctggtttagtcttgggagagagtatgtgtccaggaatttatccatttcttctaaattttctagtttatttgcatagaggcatttatagtattctctgatggtagtttgtatttctctgggatcagtggtgttatgccctttatcattttttattgcatctatttgattcttctctcttttcttctttattagttttgctagctgtctatcaattttgttgatcttttcaaaaaaccagctcctggattcactgattttttgaagggttttttgtgtctctatctcctttggttcttcccttatcttagttatttcttgccttctgctaggttttgaacgtgtttgctcttgcttctttagttcttttaattgtgatgttagggtgtcaattttagatcgtccctgctttctcttgtgggcatttagtgctataaatttccctctacaaactgctttaaatgtgtcccagagattctggtatgttgtgtctttgttctcattggtttcaaagaacatctttatttctgccttcatttcactgtgtacccagtagtcattcaggagcaggttgttcagtttccatgtagttgagcagttttgagtgagtttcttaatcctgagttctagtttgattgcactgtggtctgagagacagtttgttataatttctgttcttttgcatttgctgaggagtgctttacttccaaatatgtggtcaattttggaataagtgtgatgtggtgctgagaagaatgtatattctgttgatttggggtggagagtcctgaggatgtccattaggtctgcttggtgcagagctgagttcaattactggatatccttgttaacttactgcctcattgatctgtctaatgttgacagtggggtgttaaagtctcccattattattgtgtgggagtctaagtctctttgtagatctctaagcacttgctttatgaatctgggtgctcctgtattgggtgcatatatatttaagatagttagctcttcttgctgaattgatccctttaccattatgtaatggccttctttgtctcttttgatctttgttggtttacagtctattttatcagagactagaattgtgacccttgcctttttttgtttcccatttgcttggtagatcttcctccatccctttattttgagcctatgtgtgtctctgcacatgagatgggtttcctgaatacagcacactgatgggtcttgtctctttatccaatttgccagtctgtgtcttttaattggagcatttagcccatttacgtttaaggttaatattgttgtgtgggaatttgatcctgtcattatgatgttagctggttatgttgctcgttagttgaggcagtttcttcctagcatcaatggtctttacaatttgtcatgtttttacagtggctggtaccggttgttcctttccatgtctagtgcttccttcagcagctcttgtagcgcaggcctggtggtgacaaaatctctcagcatttgcttgtctgtaaaggattttatttctccttcacttatgaagcttagtttggctggatacgaaattctgggttgaaaattcatttctttaagaatgttgaatattggtcccctctctcttctggcttctagagtatctgctgagagatccgctgttagtctgatgggtttccctttgtgggtaacccgacctttctctctggctgcccttaacattttttccttcattttaactttgaggaatctgacaaatatgtgtcttggagttgctcttctcgaggagtatctttgtggcattctctgtatttcctgaatttgaatgttggcctgccttgctagattggggaagttctcctggataataccctgcagagtgttttccaacttggttccattctccccatcactttcaggtacaccaatcaggtgtagatttggtcttttcatatagtcccatatttcttggaggtttgttcatttcttttcactcttttttctctgaacttctcttctcacttcatttcattcatttgatcttcaatcactgataccttcttccagttgatcgaatcagctactgaagcttgtgcattcgtcacgtagttcttgtgccatggttttcagctccatcaggtcatttaaggacttctctgcactagttattctagttagccattcatctaatcttttttcaaggtttttagcttctttgcattgggttcgaacttcctcctttagctcggagaagtttgatcatctgaagccttcttctctcaactcatcaaagtcattctctgtccagctttgttctgttgctggagctgcattcctttggagggggagaggtgctctgatttttagaattttcaacttttctgttctgttttttccccatctttgtggttttatctacctttggtctttcatgatggtgacttacagatggggttttggtgtggatgtcctttctgtttgttagttttccttctaacagttaggaccctcagctgcaggtctgttggagtttgctggaggtccactccagaccctgttttcctggtatcagcagcagaggctgcagaactgcgaatattgttgaacagcaaaagttcctgcctgatccttcctctggaagcttcatctcagaggggtacccgaccatgtgaggtatcagtttgccactatgggggggtgcttcccagttaggctactcaggggtcagggacccacttgaggaggaagtctgtccgttctcagatctcaaactctgtgctgggagaaccagtactctcttcaaagctgtcagacaggggcatttaagtctgcagaggtttctgctgccttttgtttggctatgccctgcccccagaggtggagtctacggaggcaggcaggcctctttgagcagcagtgggctccacccagtttgagcttcctggccacttgtttacatactcaagcctcagcaatggcgggcgcccctcccctagcctcactgtggccttgttgtttgatctcagactgctgtgctagcaatgagtgaggctctgtgggcgtgggaccctctgaaccaggcacgggatatattctcctggtgtgccatttgctaagactgttggaaaagtgcagtattagggtgggagtgacccgattttccaggtgccgtctgtcaccccttccctttgctaggaaagggaattccctgaccccttgtgcttcccaggtgaggtgatgccttgccctgcttcagctcacactcggtgggctgcacccactgtcctgcctccactgtctgacaagccccagtgagatgaacctggtacctcagttggaaatggagaaatcacccatcttctgcgtcactcacactgggagctgtagactgcagctgttcctattcggccatcttggaactgcctcccattttgatctttacccacacagataattgtgacgtatttctaggactctcacctaaataaagttatccttttacctgggctctcctctcaggggttattgcaaggtattgctggacgtaaagcctaggtgatgtgactcttctagactgcttagcctttgctcaatacaaaattgtaatgtttcaatggatccaagacctaaatgatgtgactatcatctcttgcctgagccctgaatacattgtgttttgtgacactgtgactctcttgcatgggccctgccaacagaaggcattatgacatatctctggctgcatcaattatttgatgtgactctgctgttttacctggacattgcccatagaagagattgtgacatatctctgggccaaatagctaggtgttggtgactctcctcttttgcctgtgccaggctcccagaaggaataatgaattatcactaggcccagcacaaatgcaatgtcattcttctgcctgattattgtccacaagggccactgtgacatatctctgggcccatgacctaggtgatgtgattctcattttctttctgggacttgtccacagtgaaaattgtgacatatttcttgctgtagcacctacattatattactctctactcttgcctgagccctgcctactggtgtgattgtgacagataagtgggcactgaccttatgttatgtgattcttatctttttttctagctgtatttaccagggacattgttacatatttcttgttccctcaccaaggtgatgtgacacctctgcctaagcctttctctcaggaagtattgtggcaaattgttgtacctggcacctaagtaatgtgacccttctctacttcttgggctctgctgaaggaggcattgtgatgtatccctggacacagggcctaagggatgttactctcctctcctgcctgggcccggcatacattgtgtgttgtaatatatggctgcacccaacaagtacgtgatgcaactctactctacggtccctgaagacaggggtattatatgatactgtttgttcatcacctaggagatatgacacatttttgttgcctgggacctgccaaataagaagattgtgacatatcacttgatccatcatctaggtgatatgagtctctctctctctctttttttttttttgcctggtccccacatgttttgggtattgtgacatatcgctgggcccaatacctagaaatggaacgctcctggctggggcctgtccacagtggacctggtgacatatttctgcatttatcacctaagcaatgtggctctcttcttctgcctgcaccctgcctacagggaagattgtgacatgttgctggcctcagcaaacagatgataagtctctcctaattgagtcttgcccacagaaagcattttgacacatcgctgggcccattaacaaggtgatgtggttctgcagtctacatcctgcatccagctttcaggaggggattgtgattgtaacatattcctggctaagtacccaggtgatattattcctctgcctggtcccttctgtcagggaagattgtgacatattcctggaccagaacataggcgatgcgactctcctgtttgctccctacccacaggtagggacatatatcttggtccagctaacagttgcaatgatgactctaataccacacaccagccaacagaaaatatactgtctgttttagctgaggttagagacacgggtaaaatcccatgtctcctctttgtatgaaggttatagaaaattaccactttctcacacattgtataaagccctagtgtggaacaaaatgtcaccacggaacccagcattcaaatgagattgtgtttctcatattctcaccctaccatccattaggattttcacccttacacgtggacagagcccacaggtgaggtcctgaatcacacaggttgacacagtccacagctggaattgtttctctcatttgctaagttgggatggtgactcatttccaaacctagttcacttctgtttggactgagccaattgaagagaagttgactctgagacaagcggttagggtaaaaattataaccatgggtccataccagaagggaggtctcaaagcatattgaggctctcatgcataaagccctcaggtgctacaaagtgtttcctgacaaggcacagcacaggtgagattttgacactggtatgcacatcatactgccacatgaacacagccaacttttgaggttctgaatgtcacatttggaggcagtcgaaacttgaaaaagtgactcttatatgtggatccagtccacaggtgggctggtgactctccgtccaagattcagcacacctgtgaggctgtgactctactaaggaggcatagtgcacagaagaaagcgaggttcccacgcacagacctagtccaccattaagattgtgactcatgtatttagacccaacatagaggagatgttgactcccatacttagaattgggtcatgtgcaagaactttaactttatccctgtatctttctgcatgtgagactgtgtgacatatgcctctgtccagcaactgagtgatttaacacttctgccttggcccaacccacagatggaattttgacatattgctaaacccagcaccttcatcatgggactctattccactgccttggcactgcccatagacagcattgtgacatatcactgtcactaggccttatattcagttaatgtcagtctcctcttctgttttgtcactgtgcacagaaggcattgtgacgttgggccccacacccaagttatgtgattctcctacctgtaccctgcccacacggcccattgtgatatgttgcttggtccagaacccaggtgatgtaactctcttgccttggcccttcctacaggaggcattatgacatctctgcacccattagccaggtgatatgactcacttctgcctgatcgctgctcacagggaatattgtgactcatcactgggcccagcattgagttgatgtgactcttctattctttttaggttctgcctgcaggagagattgtgatgtgtctctggactcaatagtaaggtgatgctacacttttgccttggtcctgacctcagaaagctttgtgacatattactgggctcagcaacaacatgatatgagtctcttgcttggaccctgcccacagggggcattgtggcatatctctaagttcatgaactatttgatgtgactcttcttgcttatgtgggctttacaattagaagagattgtgacatgtctctgattccagcacctaggtgttgtgactctcctcgtttgcctgtgctatgctcactggatgtaaagtaaatgatcactaggcacgacacacaggcaatgtgattctactgcctggtcattgcccacaggggtcactgcaacatatctctgggcccattacctagatggtgtaattctccttatttttctgcttctgtccccagtagggattgtgacatattccttcacccaacatttatgttatgtgattctcctctcatgtctggactctgaccacttgtaattttgacataaggctgggctcatctgtctaggttatgtgacaggttatgtgactctcttcttttttcctaagccctacctacagggagctttggtacatagctctgggcccctcaccgaaatgatgtaatcctcattcttgggcccttcactcagtaggtattgtgatatattgatggactcagcacctaggtgaggtaactctcttctacttcttgggctctgaccaaggaggtattgtgatgtatcgctgagcccagcacataggtaatgttactctttttgtttatcacttggatgatgtgacacattttatttttctgcctgggccctgctaaaaagggggattacaacatatcatttggctcagcacctatgtgatgtgactcctttcttctaggccccacatatttggtgtattgtgaaataacgctgggtcccacacctagaaaataagaggctcctgcctgggccctgcccacagggggccttgtgacatatatccacatacactacgtaggaaatgtgactcttcttttctgcctggaccctcctaacagaaaagattatgacgtatcactggaccctgcaagaaggtggtgagtctcttttgactgggtcttgaatacatagatcactgtgacatattgctgagcccttagagaagactgtgacatacatctggccccaaacccaggtaatgttactctcctgcttactcctgatctggaggagtgattgtcacatatatcttggcccagctcactggtgtgatgatgactgtcataccttcaacttgccaatgagagagatactgtctcttatagctaagcttaaggaaaaagataagatcctgggtgtcctttttgtacaaaagtcacagaggtttaccactctctaaagtcctctagtggtacagagagtgtcaccacaggtccaaggacacaggagatattgtatttctggtatacacaccctgccaatccttaagatagtcatcctcacacatggacacaacccactggtgagatcctgaatctcatacgtagacacagtctacagatggaattgtgtcagtcatatgtgaacatctggacacatatgggatagtgacccatctctaaatccagctcataggcagatgagtactcttctatttagacacagccaattggggaggtgttgactctcatacctgagcttagaatgacaggtacaatcatgggcccatatcagcatgaaggtcttaatgcagattgcaactcacatgcatatcatattgtattacttcattttcacactgctataaagaactgcccaagaccaggtaatttatgtagaaaagaggtttaattaactcacagttccacatggctggggaggcctcagaaaacttacatttatggcagaagaggaagcagggaccttcttcaacaggtggcagcagggagaaagtgaatgaagaaggaacttccaacatttataaaaccatcagatctcctgagaactcactcactatcacgaaaacagcatggaggaaactgccccatgatccagttaccttcctgctttgacacgtggagattacaattgtagatgagatttgggtgaggacatagagccaaaccatgtatctcataaattctttgggtggtacagagagtgtactaatagcctagctgaaaggtaagattgtgacagtagtaagcagacacagtcaagagtaaagattgttgtcctctcacatgagcatggcccactgttgaggatttgaatcttatatctagaggcagtcaaaagttgcaatgttgactctcattcatgaattcgttatgcatggattttgtgacccttaaaccataatttagcacacgtgtcaggctgtgacttttctaaggggacacaatgcccagaaaacattgagaagctgctgcacagatccagttcacagttgaggttgtgacttgtctactttacccatcatacaagacatgtggactctcatacctagaaccagaacatgtgagggattggtaatttcatccctgtattttttgaaggtctgattgtgacatacacctctgccaaacacctgatttgactctcctgcctggcttggttcacgggtagaattgtgatatattgctggacccagcacccaggtgagatgactctattctcaagccttggtgcctcttacaggaggcactgtgacatatcgctgggatttgcagtcaggtaatgtaaattttctctcctaccttggtgctgccaataaggggcattgtgtcatattgctcattttaacacccaggtgatgtgactcttctgcctgggtccagcctaaaggggggattgtgacatctctctgcactcatcacccaggtaatgtactctcatctcttgcctggtttctgttcacaggagggaaggtgacatatctctgagctcagcacctagctaatgtgacacttctcttcttcctaggttctgcccacaagggagattgttacatatatgctgggcccagctttaagatgttactcattagccttgtccctgccttcagaaggcattgtgacctattgtgggacccaggaccaaggtgatgtcactttcttgccttgactctgtcaagaggaaacatcgtgacgtatctctgggtccataaaatatttgatgtatctttctgttcttaccagggttttgcttatagaaaagcttgttgcatatctctgtgcccagcatctcagtgatgtgactccctctcctgcctgggccatgtccacagatgaaaaactggcttatccctggggcccagcacacaggcaatctgatttatttctcctactctctttctgcagggggcattgtgaagtatctcttagcccatcaactatttgatgtaaatctcttctattacctggggctttgcccataggggaggttgtaacatatctcatggcccagaatgtaggagatgacactctgctctgattgttaatattgctttgctcaccacttacttgatatgactctcctctcatgcattgtccctgccccttcgggtgattgtgacatatagctggctgtagcccctaggttatgtaactttcctcttcttcctgagccctacccacagaaggcattgtgctgtatctctggggctctcacctaggtgatgtggctctcctgctttggtcttcctctcagaaagtattgcgatgtattgctggacctagaacctagatgatgtggctctcctctactgtttggtctctgaccaaaaagagattgtgatgtatcactaggccagcatctaagtgttgtggctctctgctctctcctaggcactgcatacattgcgtatggtgacacatggctggatccaaaaccaaaataatgcaactcttttgcattggcaacgtccacaggtgtattaccacatatcttttcctttagctctgaaattgagctctgaaataatatggattttttatctttgtgcccatctctcctgttgagtttaaactttaatccagggctgggcacggtggctcacgcctgtgatcccagcactttgggaggcccaggtgggtggatcatgaggtcaggagattgagaccatcctggctaacatggtgaaaccccgtctctactaaaaatacaaataattagcctggcgtggtggtgggcgcctgtagtcccagctactcgggaggctgaggcaggagaatggcgtgaacccgggaggcggagcctgcagggagccgagatggcgccactgcactccagcctgggcgaaagagctagactccatctcaaaaaattaattaattaattaattaaataaaataaactgtaatccaaagccatgaaaatagtcataattactgtcacaaagtgataacttttttctcctcctccttcttttctcttcctcctttgcatctcctcctttccttttcctctcttcctcctcctctcatccttctcctcctctcctcctcatctcttcttcctccactcttcatgttctcctcctcttctttttctcctttctcccctccttttcttcctctcctcctcttccacttctcctctttcttcctcctcctctccttttcttcctctcatatttctcccctcctcctcttccacctcctactctccttcacttctcttcgtttcatcctcctctcttcctcctcctctttctcctctccttctctcctcctcactttttcctcctcttcctcttctctttctcctcctcctctcctccttctcctcatgtcctccttctcctcctcctctcctccttttcctcctctcctccttctcctcctcctctcctcctcctcctctcctccttctcctccttctctcttctcctctcctcctcctctcctcatctcttcctctccattttctcttccttcccctctcctcctcctctgccttctcctcttcttctcctttcctcttatttttctcctcctcatcctctcattctcctcctcctccactacttttctcctatttctcctctcctccactgctcttcctctccatttcctcctcctctccttctttttcttctctcctcctgctcctctttctacttttctcctcctccttctcctctcctcctgctactcctcttctccttttctccttctccttctcctctcctcctcctacttctccttctcctgtcctattcctcctctcctcctccttccccaaaactctcctcctccttctccactcctcctcctagtactcatcttttactccccatcctctcctcatctcctcctcctctcctctccttatttttctcctcctccttctcctgtcctcttccttcttctctcctctttcccctctttttacttctcctctcctcattcttttctcctcctccttctcttctcctcttccttctcttctcctcctccttctcttcttttcttctctcctcttcctcctccttttattctcttctccttttcctctcctcctcttccttcttctcctctttcttctttccctcttttcctcctccttcttctttttctcttttcctcctccttctactccttctactctccttctcctctcttcctcctcctcctctccttttcctcctctccttctcctcctcctcctcttccactgctcctccttctcttctccttcccctctcctcctctttctcctttccttctgttcttttaatctcctcctcctctcctcctccttctcctctcctctttattctacgctccccctccttcacctcttgtcttcctccttctcatcttttactcctctttctcttctacttcttctcctctcctcctctcctttccttttctttctcctgctccttctcctctcctcctcttcttctctcctctttctccttttttcctcctttccttctcctctcctccttcgcctcttctccttctcctactcatcttttactccttcctcttcttcttttcctctcctccgttccttttctttctccctttcctccttctcctctcctcctcttcttctctcatctttctccttcttttttctcctatccctctcctctcatcctctgccttctctcatctttctccttcttttttctcctatccctctcctctcatcctctgccttctctcttcctcctctgctttctcctctcttcctcctccttctctcttcctcctttttctcatctcctcttccttctcctttcctcctccttctctttcttcccctccttcccctctcttcctcttctcctcctcctatcctccttctcctcctccttcactcctactcgtgttcctctcttcctcctttcctcctcctccttcttgttctctccttctcctttttctctcctcttcctcctcctcctctcctctttctctccttctcttctcctttttcattcctctttctttctactcctctcttcttctctctcttctcctcctccatctcctctccccctccttttcctccatttcctcttccttccccactcctcctccttctcctcttcttttcctcttccttctactccttcttctactctcctcctcctctgcctctcctccttctcttctcctctcctcctccttcttcactcctccttctcctctcttcctctttttcttccttctctcttttttcgtacttctcctctcctcctccttcttaactcctccttctcctctcttctttttcttccttctcttttttgtacttcttctgcattccccctcctctcctttttctcctcctcacctactttttctgctctcctccttctactccttcttctcctcttctcctccacttcttcttttactccttctctttttcctcctgcaccttctcctctcctcctcccctccttttccttctttttccctcctttttctctcctcctccttttccatttctcctctcccatcctcctcctccacttctcctcttgtccttctcttctccttcttctcctcttttcctcttcctccttctcctctcctcttccacttcgtttttctcctctcctgctcctcttcattttcccctccacctccttttcttcttcttctcctcctcctctcctcttgctccttctcgttcttcccccctttttcttttcccttcctcctcctcctctccttctcctttttactccactccaccaccttttctcctcctcctctattttccatctcctctcttccttttcctcttctttttctcctcttcttcctctctcctttttctgtctcctcctcctttcctcgtcctcccctcctttttctcttttctttctcctcctctccttctcctcttcctcctcccttctccctcctctccttttcctctcctccttctcctttcttcctccttttctcctccttttccgtctcctctcctcctcctcctcttctcctcccctcctcttctccacctttttctctcccttcttctcctctccatcttctcttcctctcttacttttcctttctttcctctttcttcttctgctgtcctcctccttctcctcctatatttctcctctcctcctgttcctcctcttcctctcctcctccctttttccctctcctctttctcctcctccttttttcttctctcttttggcttctctcctccttcttccctccttctcctcttcctcctcattttcctcttctccttcttctcctcatcctcctctcctcctcctttcctccttcccctcctcctcttcctcctactctcttcccccctttctcctcttcttttctttttctcctactttcctccttctcctcaatcttttcctcctttttagctcctctacttctctctctcttctcctcgtcctccttctctcttcctcctctcctcatactccttttcctctcctccttctcctcctcctctactcctttttctcttcatctcctccttttcctttttctctcctcttcctctcctcatcctccttttccttttttctctcctcttcctcccatcctctttttccttcttctcttatcctccttctccttctctttttctccccttctctttctcctccttctcttctcctctcatcctcatttcctcctcctcttttcctccttctctttttctcctcttctcctcctcttctaattctccttttctttctcctctaatcctcctcattctcctttttttctactcctccttctcttctcctcctcctctccttttttctcctcattcttttcatctcctccttctctttcatcttctcttcctccttctcctcctcctcttcctcctccttttctattccttctcctctcctcctaaatttcctttttcttttcttccatccctttcttcctccttttttcttctcttcttctcctcttcatctcctactcctcctatttttctcctcctctcctttctttttctcccctcctctttcttttctcctccttcttctctatttctcctttcctcctcctctccttcacctcttcatctcctcctccttctgctccccattctccttctctcctcctttttctcttcgtcttctcctccttcttcttgtccccccctccttctccatctcctctactcctcttctcctcctcctcttcttctcctcctgtcctcctccttctctccttcttttcctcctttcctccttttttctcctcctctccttctcctccttctttttcctcattctcttattcttctcctccttctccttctctctctttttaatctacttcctcctagcttcccttttttcctctcctctcctggtcctgttgtcctcctctctttttttttctccacttcctctcttcttcctatcttcttctccttttctcttctagttcttctctttcctcctccttttcttctcttctcctcctcctctttcttcactcctccactcctactcctcctcttactgagccattagccatgccaagcagcatccagcacacgtagtggcagcctcttcagcgctgcactagaaagacctgatgtacatttatattagcttttggaggatagtattaatccagcctaactcaggcggccaagtatatatatgtaatctatctatctatctatctatctatctatctatctatctatcatctattctatgagaaagaatcttgctctgtcacctaggctggagtgcagtggcacaagattatgattcactgtgtcctcaagagatcctctcacctcagcctcccgagtagctgggactacaggtgtggcccatcacacctgactaatttttttttcagtgaccgggtctcaacatgttgcctagactggtctgaaacttctgggcgcaagcgctccctctgtcttggcctcccggaatactggggtgaatttatttcttacagaaccgccctgattcagatggtgcaagcctcgcaggccagaaacatcttcctgacgctgctccccaccttctgccctctctttcccagcatccttcccctgtggaaagagaaactttccttctaaggtctttccagcccctccctggcagggaagcctggaaactagggcccctgctttcccctgcagtcgcaaagcatctgggtgctggccaggaggtggcctcctggggtgctctcaccagggtgtttggtggaagcccctgacgcaccctgctctgtggatttgatcttcctgggcagaggacactggcttcgagggggcagcaggcagccctgcgccctggccctttcctggctggcggttttggtgtggctgactacctaccaccttgggcgcccaggaaagaagggggccagggcctggccatgggggcgcctatcggtccttgcccttccgttggctaagtgcgtgttttacagagatccgtcggtgtggattgcaccttccttgttttacagggatccgtcgatgtggagtgcaccttccttgcagtcgggggctcggtgccgggtgccgtcgttagtccaggaagaaggcggggagcttctcccgctcgaacaatttgcagctagttccggggcttcccttcctcctcccacaccggcccgcatcctagtgttgctttctctgcccccagcaccagcctcttcttgggctccctcctccccttcccactcgcgtctcttaggaaactgcgaccctagtgtttgctaaggagcaggggaggtccttcccgtcgccgacgccccccgcccggaaagcggcgcgttttctgggccgagggcgcatcgaggatgtgacccattccctggccaagggtgtgggtggggaacggcaaccgatctcactgcctggcggggcagcttcctttccaggcaaggcggagacctgcagggcgtggagaccccgcccggcgcagaacgcgctggccagtgggcagcttgacagggtccccgtgtgcctagcgaccctcttcagcgctgcatccatgagaggttataaatgaggcggaaagaatttttccctgctcagcggatttgtcctttttctctcctgactggataggagatagaacacagatacagcccagatccggggcagcagttcacactccattacaaaactctacacagcttccgagctagcagcagcacacattcagggaacattggagggattttcttcttcttttgtgggtggtaatgttggtggttgtggagagagatagaagagtgaataagaaaagtataacgatttggtaggctgaaaaacctgtctgggattttcattaatagaaaattgaactcttgtccttgtttaagagttcagatttaagcttagccctttcaaagtcaatggaaacaaagtttgccttttagataggaatgctgaaaataatgagacacttctgtctggaggaaacaaaatgatttctgcaaaggcagagtcgccagtccatccccatatatttgagggttttttccttttttagatatgtgtggtctctgcacctatgcacaatgttactgaagtatatttaatagaagtggaaagtgagggaaagggaattgcaaatagaagaatgtgattttgttttcatttttttcatacctgtgaaaagcattctctagatttgatgctttttcaagtaggcagtatagtttctaaaccctattttaatcagggagtctgttagagaccacaatcttggctaaaacctctttggaaacacacacacacacaaatgcttaattctgtgctaccttcaagagttggcagaatttttgcaggaatgagtatgagttccttctaaaggatcttgtgctccattttaggtaaatgaagttgccctatcttattttattttattttattttattttattttattttatattttattttattttattttattttattttatttatttttgcgacggagttttgctcttgttgcccaggctggagtgcaatggcacgatcttggctgactgcaacctccgcctcccaggttcgagtgattctcctgtctcagatttcccagtagctgggattacaggcatgcaccaccaagccctgctgatttttgtatttttagtagagacagggtttctccatgttggtcaggctggtcttgaactcccgacctcaggtgatccgcccacctcggccacccaaagtgctggtattgcaggcatgggccaccgtgcccagcccttatcattcttaaaaatactgctaaactggttgcatattaggatatctcatttttaaagggtttgctggatgtgcgagacttttaagaagtgctactgatgcttatggatatatggaatatcattctctggggttttctatataccactttatttctcatcagaaattcagactcaaagcccttagcgtgccagacacgagtttgttatgtgatggttaacacgcatttcactgagctggtacaggtgatacattcatacctaacttgttacaccatctaagtgaccgtttgatgaaagggtcttttattttaagtttattcaggcagacttttgaggtcttatttgcatctggcaaaggtacagcatgttgaaggagaaaaaataaaccttaccttattattcctgcattagatcaatagctgtttattggccacctggtctgtgccaggcactgtacaacatgggtgacctagtaataaatggatggtaataaatgtagttgccagccggtcatggtggcttgcacctgtaatctcagcactttgggaggcctaggcgagtggatcacttgaggtcaggagatcaagaccagcctgaccaacatggtgaaaccccatttctactaaaaatacaaaattagccgtgcttcttggctcatgcctgtaatcccagctactcgggaggctgaggcaggagaatcacttgaacccgggaggcagagattgcagtgagctgagattacagcactacactcaataaataaatgaataaacattgttgccctacatcaggagtcctcaacacccagggcacagactgataccagtctgtggtctgttataaaccaaaccgcacagcaggaggtgagcagtggatgagcgaggcttcatcaggattcacagccactccccatcactcgcattacaaatcagcagcagcattagattatcgtaggagtgcagaccctattgtgaactgcgcacgtgagggatgtaggttgtacactatttacgagaatctaacgcctaaggatctctcactgtctgtcatcacccctagatgggaacctttagttgcaggaaaacaatcccatggctctcactgattctacgttatggtgagctgtataattatttcattatatattataatgtaataatagaaacaaagtgcacagtaagtgtaatgcgcttaaatcataccaatagaaaaccatcttgccacatccgtgaaaaaattgtctgtcacaaaaccagaccctggtgccaacagggttgaggagcactgccctacattgtacagtgcctgacatacaccaggtagccaaaaaaattcttagtggggttaattagagcttttaaaaactgtatttgtctttccctagcttgctttgtattttctcttttttccgtgttctcagagacaatggggtaggactatataaatgtgtgatatttctggtagtttaattactttaaaatgttctttattcattttgatgtaccttcttggactaagttattttcaccctgcttctttgaaatcattcaggaaagattccatgtttatactcagaacaacactattagggttgggtgggtatgttgacccattttatagctgctttatgaggtacccagtggctggcaataaattaagctcagcatccacaattcctaactaccatctagctccatggaacacctgctttatagagtcagcttgatctcaaaaaaaaaaaaaatcatagatttaaatgtatactgcttatttacctctgtgtatgtgtgttgttatttttaataaagacctttttttttcaaaataaatttgattgaatttgaaggtataagggaatttcaaatgaaactttagcctctggtgacgttgccattgatgaatatgatgatagacatcttttcagtagcctttctacctcatgggattgttgtaaagataaataaatgttccagaaactcaaaacctacatatggaataaagtggtttattttgagatcaggaagttttgtgggtatccactgtggatttcctttccagaattttgaatttttgagtgatttgctttggggaagggtgctactggccttaagtatacagacactagaaatgctgctcagcatattacaatgcacaggatagccacaaatgtcagcagagctgaagtcaagcaagcctgcttgagaggtgtagtagtggcctttattgcatccacaagcacagtgggtgcattccctgtattgcatgtgctatatttagaaatctgaaattccataaagtaagtaagcttttatttgcctctaagatgccatggttggcaaggtcaaagttttacaagaagcttgggattgaggaaaacattaagtggtattcagtgtatttgaaaactccatagtaaataagagctctagaactcatcagcttcttcaacaaatgagatgcattggctctgtaaagttgttttggtaggtggctcctacctgagttatttaggaaattcgctctgatgctgtcatctgccagtctccctcatgttttcagttacgtggagtatatcttttaaaaaaattctttgaactagctcttactagcttgatagttaatgtttttgcattcatagtctcccttattttaatttctcaagtttttgcaaaattcttacataactatctgcccttttcatagactggtgtttctgagccaggtcttctgtccacacatgtcgtcttgagagagtggatgttagccagctgccctggctgagatggatggggacaatacagggatgcaataaaggagacagtgataatttatatgatctgggaccccaggcctcacaccagaactgtctagtatatgtttagcaaataagtgccactgatttgacctttgtcctgcccttccactttccaccctactacacaagcaggaaatatgcacgagataaggcaggaagatgaggagactgaattccagaaaagaaagggctgcctgcagtaagcagacagttgcctccacagtggtctgggctcccacttaccttagagacatgtgcaacacttgagaatagttgttttaaaattctgaaatcagtggacagactgtaagcatcccattgcagtcagttgccaggtacctgttctctgcagcaacctttcacctcccatacttgggagtgagttctgttcctgcagagtgccctgtgcattctggtgcttttgtgccctctcctttaacctataaactgacaactctaactctacattttcacttacaatttttctgaagcagtaatcttttgtgatcctgatcacactacaagtccctcaccctgcaagtacttgtaaaaatgaaagtaatgtccattccttctggaaggtgattgccatgcacacaacctactaggccaggaacattactgatggctgtcctgatgcatgtctctctcacccccatgtccaatcagtcaccaggctctcctcaaaaccatgcttcagtcactgactttggctgtttaatcacttctgacctaaggccctcattgagtcataagcacctcttaattttctgccaccagtttctctctactgctgttaatcttccagcttgctgccagagtcatcatcctcaaaaacaaaagctgctgtcattgtttgcctgcctaataacatctcttgcctccctgctgtctgcaaaaagaaaaatccaaactccttcacttgttttacgaagacccatatctgcttccaaaccaaattgctagtcttggctcttgtctctgtcttccacatcactgacacactgaataattctttactgcccctgctgttgcatgggttgttctttttgttgtgtctccatccccttcccccagcaaagaatatttactctttactcttcgttgagacccatctcaaatagtaccttttctagggagaattaggccttctgttcctaataacttttaccctcgtctatcaagtctgtctgctgtaatttatctgttaacatgtttctcctacctcaaggatattttttccatcttctgtacctagcacaattgcatggctgatgctcactgactactgcatgttgatttacttattttattttacttgtttgagagatggagtcttgctctgttgcccaggctggagtgcagtggtgcaatgtaggctcactacagtctctgtctccctgtttcaagcaattctcctgcctcagcctccccagtagctcagattacaggcacccaccaccacgtccagctaatttttatatttttagtagagacaggtttcaccacattggtcaggctgggaaatgaagggatgggccaaattaaaggaataggttgggctaattaactgcagcaggagcatgtccttaaggcatagatcactcatgctattgtttgtggcttaagaatgcctttaagtggttttctgccctgggcgggccaggtgctccttgccctcattctgctaaacacacaaccttccagtgtgggtgttatggccatcatgaacatgtcacagtgctgcagagattttgtttatggccaatttcagggccagtttatggacagattttggggggcttgttcccaaaaactgtaaatgaagtaattaaaatggccagccaggagtggcggctcatctctgtaatcccagcactttgggaggctgaggcaggtgaatcacctgaggtcaggactttgagactagcctgggcaacatgccacaactgtatctctataaaaaattttaaaaaatagctagatgtaatggtgcgcacctatggtcctagctactcgggaggctgagataaaaagatggtttgatcctggaaggtggaggttgcagtgagccaagattgttccactgccctccagcctgggtgacagattaaaacccatttcaaaaagaaaattaagataaaaattaaaaatgtgtgggaaaaaagatggaaagacaaacacaatataataaaacctgtgagataaagcaaatataatactaagagggcagtttacagcctaaatgactgcatcaaaaaagtagaaagcttacatattgagcacctgacatcacacactcttcaaggaactagaaaattaataataaacaaaattccaagttagaagaaaaaaataacaaaaatcagaacagaaccaaatgaaatagagatgaaaaacaataaaaatgatcaacagaatagagttggttttccaaaaagacaaaatgggtaaattgctaggtagattaaccacaaacagaatgaaaatctaaataaacaaaatcagttatgaaagaagacattacaatggatacaacagtaatacaaaagttcactagaaatgattataaacatctagacactaataaacctgaaaacctaaaaagaatgaataaattcatgaaaacatacaacctcccaagatagagccaggaagaaatagagtacctgaacaaaccagtaatgagtagcatgattgagtcagtaataaaaagtatctcgacaaagaaaagctcaggactggataaacgcacagccaaattctaccaaatatacaaagaataataatcctccttaaactcttcccaaaaattgaagataattaaattctccctaagtcactctgaggtcagtatcaccctgataccaaaactagccaaggacacaacaaagaaaactattattatattattattataaaaaatagacaaatgggacacaaaagagtttttgcacagtaaaaaaaaaaaaaaaaatcaacaggataaataggcaacctacagaataaaagaatatatttgcaaactatgggccaacatgaaaccaatattcagaatttacaaataactcaaacaattcaaaaatatcataataataagaaatcccattgaaaaatgagcaaatactactaagcatttttcaataaagacatacaaataaccaacacgcatataaaaaacatgctcaatctcaactaaaaataaaactacgatttgattcagaaacctcatcattgggtatctactcaaagaaaattagtttattacatgaaaatgatacctaatatcacctacaaataggcaactgcaaatgaaaacagtgatgaggtatgacttcaaatctgttaaaattactaatatcaaaaagaaaaaatagaggctgggcacggtggctcacgcctgtcatcccagcactttgggatgccaaggcgggaggatcacttacgttcggaaattcaagaccagcctgaccaacattgggaaacaccatctttactaaaaatacaaaattagctggtcatggtggcacatgcctgtaatcccagctactccagaggttgaagtgggagaatctcttgaacccagaggagaatcacttgaacccaggaggggaagatggtggtgagctgagatcatgccattgtactccagcctgggcaacaagagcaaaactctgcctcaaacaaacaaacaaacaaacaaacaaaaacaaaaaggaaagaaagaaaagaaaaaatacagaaatagcaagtaacatctgtcattgatgttcctgagatttctgaaacaaatcttaatgtcaccactgctctcacacacttcagatatgatggaaaaagaaaacttcagaaatgatctaacatgcacttcctcaaaatactcagagatattcttatatccccccttgaagcaatggaagaggaggcatatcatgcagcaccttataagccataaagaggactttagctctcacggtaccttcaaaggaaaatcactaaatagcaagtaacgtccatagagaatttaatggtatgggacaaatgatgctcctatacaaaagctacagaataaaaaatggctttttaggaaacatttccactgaagcagagcatcccataccacattttaaggtctgcaattctttttgacctttgtacctctcgtctgtgttatctgcttcattcatgcttacctgcctgagtatttgaccactgtctcatgtctcttcacattccaggggtcttttatttgctcaaggcaggagatgcgatcaggtttagagacagcaaggcctgttttgttagaaaaaagtaacataacttgctgagattctacagttaccaaccttgtaccatgttcagtagagaggagaaaatatgaaagattctagaaatttaattccaaaatactgttttctgacagaaacttttgaatatttagaacatattttacatttctgggtccttagctctactattcaatattattgaatttaaaattggtgctggatattgaattttaatatttgggcaagaatatttaatgccactgaatttctagaatgaccattaatctagagtgaagaatacagattagctcaagaaaggggaagtttcctgttaaaacatcttgaagattttcttttctgttccagtaaaccttcaagttttccttaaaagtgttgatctaaaaataatttgtgcagaggaaaaactgccaaaatcattctacaaagggagaaaatagaagccttagggtgtattagaaaacctggggaaaatgtattgacaccgagagaccagttttcggcagttctctaacactgcatctctgaacaaatttcactgagcagtattcagacattccacacctcctgagagaattctatggccacagccttgaaagttaacatttcctaaaataaacccaaagacccacacatacttagcaagtggtcataggcagaattattaattttactctaagtgtttgagagttaagagaactggctctgtttcacataagagactggcattatccaataaaatattgttcaatagagaaagattctctaatgtattccttcattctgaggaaagaggatgaaacaagatccacaaaaccagtgtatgtattatagttttctgaatgacacagcataatatttatggcaaaaacacaagcatttacagttttgagtgccatatatacattatacagagtaaggtgtgtacagttctcatatggagaagtcacagtaagttagaagttacctctcgaattttaatgcatacattaataaactggagattttgttaaaatacgtattctaattcaagagatctgggatgagacctgagttactgtattgctaacaaactcaccaatgatgtcaatgattctagcttaagaaaaatactctgtaaaacatctagtaagtgatagaacctgggttttttccccatgtatatgaccagtaaacaaagatgacagccttcattttccaaagcaatgtataaacaaagagaaactattaagaaaaagagtgtaagaaaaatggatgttctgtggtcaaaaataggccatggtaaacgtctggttcagcatgactcagttagtttagagtgcaggtgcaccattctacttattatgtaacctggttgtataagctcatacttggctctgatccactattgagtgaaaagagtacacagacaggtggacaggagggagagggagagtaaagctgctcaccctgtacacagggctcgtgctcaggcttgtgcctagagagaaaaaaaagccatctcaaaaattcccatagttccttgattgtttttccagcaacccaccactcacccacccactcctgttagacctcagattaggctggaacctgacacttggcatgataggggagctttcagagtaaatgtgattgtttatgcacattagtcacctctccaaaatacctattaataatacagtttttaaaaagaaacattatagtgaagaaattcttcagaaaacacgttaaccaagttaataaaattaatgggacagattggtatcaggtgctgatacatataggaggatgcaacatgactctgtgagactactggccaaaaaacataaattataatctgaatctaatcatgaaaaatgtgttttatgtaaagttcaagccacatatgttgcccatgttttgtaatttctagtagtgtatctaaaaactcttttagcattctagaaggcaaatttctttgaattcattcctttaaatatctttctaaattattccaggctattaatttcatccttttaaagtgtgcatttaaaaattatgttcttcatagagctgatggagccctccgatggaacccaaaaggtgcggttttctccctcactgatatctgaggacccagcaccatccccaataagaatgttttatatccccacctgcccaggctgatctgtcaacaaagggaatactctcaatatttcagggtataaattcaaggtattagttgtgatatgtaagaagcctggatggagagaataaagataaggttctgatatatagaagtgaattattttaatgaggtcctttcactgtcacgagaagacaagagaaatgtagttcaaataatcttgttaggcaaaagcatcagaagtagaaatgtaaattattgcaattctaaatacatgacattctagaagaaaatgtggacagaattttgacctgggacacacttacctgacaatcaaccatttcttcctctcttctctgattccttctcaggagagattatctgaacaaatcaccatttcatcttgagactgtgtctttaaaggcatcaggacagactctctgaaggaagcagactgctcctgcaggaccctggagacaccccaaatactgtgagtgccacaactgcagaagtgggaaagggagatcctcctctcctaaacacacaaccccactggagaagctgaaagtctgtttgtgggagaagtttctaactacctggagctgcgtcaagttagagagccaagctgagtgaaatacaggggtgtaggaggcaacaaagaggccctgggagctcgctgaatccccaaggagcccattcctgcctagcaccacagggatccatcaaggggaggacagaggagcagggggtaaaacttccaaggggagaaggacttccctagctgaactttgtaacaatttgaatggggcaagaagacttatggccagaacttgggggaaggcatgaatccggcttgaagacttcacaggcatggaagaactaaagcccttttttttcccgcagctgggagacagaaagcctggggaaattttcaagcccaactcgccctccacctggaaacagactcaggtctgttatgaagggcacagtgagagtgagaccagccctttcgtttgcatgggagctgagtaaggcctgtgactgccagctttcccccacttccctgacaccctgcatgactcagcaaagacagccataatcctcctaggtacacaactccagtgacctgggaatctcacccccatctgccacagcagcttcagcaacaaccacccaaggagactctgaactcaggcatgcctagcaccccccgcacccattggtctttccctaaacaccatggtagcagaagaaaaaggacatataatcttgggagtcctgggttcccacccactgctagtccctttcaacagtactacagctgatgctttctggaaagcactatctcctggcaggaggtctaccagcacaaaaataaagcattaaaccaccaaagctaaggacacccatggagtccattgcacccttagccacctccaccagaacaggcactggtatccatggctgagagactcataaacacttcacatcacaggactctgtgcagacaaccccaagtatcagtctggagctgggaagactcattgggtggctagatccagaagagagacaaccaatcactgtagttcagctcacaggaaaccacatccacaggaaaagggggagagtactacatcaagggaacaccctgagggataaaaaaaaaaaatctgaacaacagttttcagctctagaccttccctctgaaagggactacccaaatgagaaggaaccagaaaagcaaaccaggttgtatgacaaaaggaggtttgtcaacaccccacaaaaaaaaaaaatcacactagctcactggcaatggatccaaaccaagaagaaatccctgatttatctaaaaaaagaattcaggaggttagttcttaagctaatgatggagagacaagagaaaggtgaagcccaatgcaacaaaataaaaaaaaaatcatatgagaagtgaaggaagaaatattcaacaaaatatatagcttaaagaaaaaaaaatcaaaaattcaggcaactttgcacagacttttagaaatacgaaatgctctggaaagtctcagcagtaacaagtagaagaaagaaattcagagttcaaagacaagatatttgaattaaccaaattcaacaaagacaaataaaaaagaataagaaaatatgaacaaagcctccaagaagtctggaattatgttaaatgaccaaacctaagaataatttgtgttcctgaggaagaagacaattctaaaagcttgaaaaatatatttgagggaataatcaaggaaaacttctctggccttgctagggacctagacatgcaaatacaagaagcacaaagaacacctggaaaattcattgcaaagagatcttcgcctaagcacactgtcatcagcttatccaaagtaaagacaaaggaaagaatcttaagagttgtgagacagaagcaccaggtaacctataaaggaaaacctaccagattaacagcagactacttaggagaaaccatacaaactagaagggattggggccccatcttcagcctcctcaaacaaaacaattatgtgccaagaattttgcatccaatgaaactaagcatcatatatgaaggaaagaaacagttgtatttttagtagagaagggggtatctccatgttgatcaggttggtctcaaactcctgaccccaggtgatccacccgccttagcctcccaaagtgctggcattataggagtgagtcactgtgcccagcccagaaactctttaaagcataaatcaaacaagacttataaaataaaaatacaagttaaaaaaaaatacccgatgcagtggctcacacctgtaattccagtaagcactttgagagactgaggtgggtggatcacaaggtcaggagttcgagaccaccctatctgatatggtgacaccctgtctgtactaaatatacaaaaattagcccggtgtagtggtgagcacctgtagtaccagctactcaggaggctgaggcaggagaatcacttgaacctggaagacggatgttgcagtgagccaagatcgagccactgcactccaccatgggtgacagagcagactccattccaaaacaacaacaacaacaacagcaacaacaaaacaccaaagtatgcagccaacaaagatcatgatgaatgcaatggtacctcatatttcaatactaacattgaatgtaaatgacctaaatgctccacttaaaagacacagaacggcagaatggataagaactcaccaactatctgccatcttcaggagactcacctaacataaagactcaaataaagtaaaggggtgtaaaaaggcatttcatgcagatggacaccaaatgtaagcaggggtagctatgcttatatcagacaaaacaaactttaaagcaactgtggttaaaagagacaaagaaggacattatataacggtaaatggcctgacccaacaggaaaacatcacaatcctaaacatatatgcaatcctaaatatacaaacatcacactggagctccaaaatttatagaacaattactaatagacagaagaaatgagatagacaccaacatcataatagtgggggacttcaatactccactgacagcactacacaggtcatcaagacagaaagtcaacaaagaaacaatgaatttaactacaccttggaaaaaatggactaacagatatacacaaaacatttcatccaacaaccatggaacacacattctgctcaatagcgcatggaactttctccaagatagatcatatgataggccataagacaagcctcaataaatttaagaaaattgaaattatttcaagcactctctcagactacagtggaataaaactggaaatcaacacacaaagaaactttcaaaaccatgcaaaaacatggaaattcagtaacctgctcctgaatgagcactggggcaaaaacaaaatcaatatggaaattaaaaacttttctaactgagtgacaataatgacacagcctttcaaaacctctgggatacaggaaaggtggtgctaagaggaaagttcatagccctaagtgcctacatcagaaagtctgaaagagcagaaacagacaatctaaggtcatacctcaagaaactagagaaaagagaaacaagaacaaaccaaacccaaacccagcagaaaaaaaggaaataaccaagatcagaaaagaactaaatgaaattgaaacaaaaaaaaatacaaaaggtaaatgaatgagacaaaaagcttctccttaggaaaaatacataaaattgatagaccattagcaagactaagaaagaaaaaaagagaaaatccaaataacctcactgagaaatgaaacaggagatattataactgacaccactgaaacacaaaaaaatcattgaaggctagtataaacacctttacaaaagaactagaaaacctagaagagatacttaaattcctggaaaaatacaactctcctagcttaaatcaggaggaattacataccctgaacagaccaataacaagcagggagattaaaatggtaatttaaaaatcaccaacaaaaaaaagtccaggaccagagaggttcgcaacagaattgtaccagatattcaaagaatcagtactaatacagagaaagaaggaaatctctctaattcatcctatgaagccagcatcaccctaatacccaaaccaggaaaagacacaacctaaaaagaaaactacagaccaatatcattgataaacattgatgctaaaatccttaacaaaaaattagctaattaaatccaacaacatgtcaaaaagataattcactgtgatcaagtggattgcataccaggatgcagggatggtttaacacacacaggtaaaacaatgtgatacaccacataaatagaatttaaaactaaaatcacaagatcatctcaatagattcagaaaaagcatttgacaaaatccagcatcttttatgattaaaactctcagcaaagttggcacacaagggacacagcttgatataataaaagctatctatgacaaacccacagccaacataatactgaatggggaaaagttgaaagcattccctctgagaacgggaacaagacaaggatgcccactctcactactcctcttcaacacaatcctggaagtcctagccaaagcaataagacagaaaataaagggcatccaaatcagtaaacaaaaggtcaaactgcctctgtttgctgatgatataatcatttaccttgaaaaccctaaggactcctgcagaaagctcctagaactgataaaataattcagcaaagtttctggatacaagattaacctacacaaataagtagcccttttgttcaccaacagcaaccaaacggagaattaaatcaagaactcaaccccttttacaataactcaacaaaaataaaatacttaggaacacacctaatgaaggactcaaaagacctctacaaggaaaactacaaagcactgttgaaagaaataatagatgacacaaatggaaacacatcccatgctcatggatgagtagaatcaatattgtgaaaatgaccatactgccaaaagcaatctacaaattcaacacaatccccatcaaaataccaccatcattctgaagatggtgagttagaaaaacagagttggaaaaaacaattctaacattcatatggagcccacatagacaaaggaaggctaagcaaaaaaaaaaaaaaaaaaaaaaaaatgaaggcaccacactacctgatttcaaactatactgtaaggccatagtcaccaaaacagcatagtactggtataaaaacaggcacatagaccaatggaacagagaacccagaaataaacccaaatagttgcagccaactgatcttcaacaaagcaaacaaaaacataaagtggggaaagaacacccttttcaacaaatggtgctggaataattggctagccacatgtaggagaataaaactggatcctcatctctcaccttatacaaaaatcaactcaagatgacttaagaacttaaacctaagacctgaaactgtataaattttggaagataacattggaaaaacccttctaggcattggctaggcaaaaatttcatgacaaaaatccaaaagcaaatgcagtaaaaacaaagataaatagctaagacctaattaaattaaagagcttttcacggcaaaaggaacagtcagcagagcaaacagacaactcacagtgtgggagaaaatcttaacaatctatacatctgacaaaggactaatatccagaatctacaatgaactcaaacaactcagtaaaaaaaaaattcccataaaaaagtgggctcttgattagacaactctcaaaagaagatatacaaatggccaacaaacatagatttaaaaaagctcaacatcactaatgatcagggaaatgcaaatcaaaaccacaatgtaataccatcttattcctgcaagaatggccataatcaaaagatcaataaactgtagatgttggcatggatgaagcaatcaggaaacacttctacactgctggtgggaatgtaaactagtacagccactatagaaaagagtgtagagattccttaaagaactaaaagtagaactaccatttaatcccaccactgggtatctacccacaggaaaagaagtcattatttgaaacatagaacaatgaaacagagaacccaaaaataaacccaaatactgattatagaaaaacatacttaaacattcatgtttctaggagcacaattcacaatttcaaaatcgtggaaccaaacaaaatgcccatcaatcaacgagtagataaagaaggtgtggtgtgtatatgtgtgtgtatatatgtgtgtatatatatatatatgttgggatactactcaaccacaaaaaggaatgaattaacagcatttgcaatgacctggatgagattagagactattattctaagtgaagtaactgaggaatggaaaaccgaacgctgtgtgtcctcgctgatatgtgggaggtaagctatgaggacacaaaggcataagaatgatacaatagactttggggacttggggggaagagtgggaaaaaggagggatagaagacaacatatatggtgcagtgtatactggtcagctgatgggtctatcaggatctcacaaatcactaaagaacttactcatccaaccaagtatcacctgtaccccattaaattatggaacaatgagattttaaaaaaaattattcttataattacagactagctcacataatgaatacttcataaactattacacaggctgggcacagtggctcatgcctgtaatcccagcactttgggaggccaaggtgggtgaatcacctgaggtcagtagtttgagaccagcttgaccaaccctgtctctactaaaaatatgaaacttagttgggcatggtggcaggcacctgtaatcccaggtacttgggaggctgaggtagaagaattgcttgaaaatgtcatgccaaggttgcagtgagccaagatagcaccattgcactcccgcctgggctatacagcaagactccgtctcaaaaaaaaaacaaaaaaaaactattaaacaaacaaacaaacaaaaattatgggtctaacatgagtaatagtcaacttaaaacagagaattttcatggggagattctgaagcataagccaaggattatacagtaataaattcaatacaaagcagacagaatagatttgctttcagcatttttgagaatttctttctagtaaattagacaccttcttaaaatgatttattttgctccaaaattgcttttttctgctaaaaatagtttcaaacttacaataacacaaatacatttactccaaaatttatttacacctaagatttatctttagactaatagatgtatatttaactctgtaaatcaatactaacagtccatatgtgcatgcaagcagaggccacattttacttatgtttctacataattttcattatgaccataaaagtgatcctgcagtcaataacaatttaattgtacatttaaaaataactaaaactagttagttatttgaagaaatgaattgcttgtaatacaaagaataaatgctacaggtaatggataactattttcctctaatatgattacatattgcatgcctgtatcaaaatatgccatatatggcatatgcatatacacatattatgtatccacaaaaattaagaaaaataaatttaaacgtgaaaataagaataaaagtttcacctataggaacaatattctgtaacttattgacaatttaaagccactggcaaaaaagattactagagatttcagtccattatcttaccaaataatatattgttaccatcttttacctacacccttgagtaaggtgtaataggctaaagttagtggcataacacttcaatgaattcatgacagtatttaaactgttaaaaatgtttaaatggaaagttgacataaaatttataatttaaaagtataattaatattattccataaaagtacaattaataagataacatactaacttaaacaaaatttaaaagtttttctttcctaataatgcagattactctgaacacctacctcatacatcactcaatgttataagttaaccacaaagagcctctctacttaaattttcatcatgaatcctacattataatgtccttacccttccatagaaaaggtcataaataacacctacctaaaaaaaagaatctttcgtatcttttattcagcaatgtttagtcacatattttcacatgtgaatacaccaggaatgatgaaacagcatgaagtaatttaagacattaattccattattattcactttttaaaaattccatattttcacaaaaagtatactttgagtgtaattacatctctccaaaatttttttttaaagttatatacaaataatgtttatatgaactttagtctgtattttttatactcagcattctgatttagtataatgtctaaagtttgagtgtcctagatatttctactgtgaatgattccctgatagttacatagaactaactaactttggactgaatatctttcatatttaatgcatctgcaaaaatacattttagtataaactctttggtgttttataatttgcagtttttgaaaaaaatgtttttccaaatttattacattggcagggttttcttcagtataaactccttgatgttgaacaaaattttaacaactgcctcaagattttcctctagtacaaaatgtgtacaatacgatctgtgatacaagcaaagatattacaaccctcttcatattggtaatgctttttcaaaataaatactcttctgcactttatagacatattttctgatagatcttttgatagtaattaaacttttaatgcttttatttagtatgaattctgattttgagtaagatttgagcaggtattaatggcttttttgtcaatatttgtacattggttctcaagtataaatgctttacagtgcaataagatgtgagcattggttagaagcttggccacattgttcacaccgtcaattttctcagcatgaattatcttatctataatcaagcgtgacaatcatttaaaggctttgtcacattcttcacatttctagaatttgttggcaacatgtttttatgtttagaaaagtttgaggtgttgtcaaaagcattgtcttttctttcaggtttgtagagtttctctccaatatgaataatcttatgtctgttaagaattgaggacttttttaggctttccatattattaacacttgtaagatttttctccaatatgacttatctgtagtaataagtgaggactggttaaaggctttgccaaattttttccatttgtagggttgctgtccagtatgaattttcttatgtgtagttagggatgaggatgagaaaaaggctttcccacattcttcacatttgtagggttttactccagtataaactacctcaatgtttattaaaagttgaagataagttaaaagatttgccacattattcatattatcagggtttctctacagtatgaattttcttatggttagtaagaattgaagactggttaaaggttttgccacattcttcacatttgtagggtttctcttcagtatgaattatcttatgtttagttagatttgaggaccatttaaaggctttgccacattcttcacattggtagggtttctctccagtatgaacaattgtatgtttcgtaagatttgagtaacgattaaaagctttgccacattcttcacacttgtaaggtttctctccagtatgaattatcttatggttagtaaggattgaagactggttaaagcttttgccacatttttcacatttgtagggtttctcttcagtatggattatcttatgtttagtaagagttgaggacgagttaaaggctttgccacattcttcacatttgtagggtttctctccagtatgaatcatcttatgtgcagtaagggttgaggattgtctaaaagctttgccatactcttcacatttgtagagtttctctctagtatgcatcctcttatgtatagttagggttgaagatcggctaaatgctttgccacattcttcacatttgtagggtttctctctagtatgaattttcttatattcagtaagggttgaggaccatataaatgctttgccacattcttcacacttgtaaggtttctctccagtatggattatcttatgtgcactaagatttgagaatcgatgaaaagttttgccacatacttcgcatttatagggtttctctgcagtgtgcattctcttatgtttagttagggttgaggaccatacatatgctttgccacattcttcacatttgtagcgtttctctccagtacgaattatcttatgtgtagtaagggttgaggattggctaaaagctttgccacattcttcacatttgtagggtttctctccagcgtgcatcctcttatgtttagttaggtttgaggaccatacatatgctttgccacattctttacatttgtagagtttctcttcagtgtgcatcctcttatatatggttagggttaaggatttgttaaacgttttgccacattcttcacacttataaggtttctctccaatatgaattatcttatgtgtagtaagatttgaggatagactaaaagcttttctatattcttcacatttgtagggtttttcttcagtatgaattttcttatgattagtaagggttgaagaccaattaaagatttttccacgttctttacatttgtaggacttctctgtagtataaatgcttttatgctgggttttgtgtgaaagcatgcaaaatgatttgacacatttttttacatttgaaaggtttccttccagtgtgtcttatgtctgtttgaatttacaaatttataaaagactttcaaacatttaccgcattgaaatactttgctctgggtagttgtgtaacacaggttaagtccattataaccttctttgtgcaccttaagctcatccacactttgagccttttcttaactgtaaattctgatgtccacatttttcatatcttcttggtattactttttgaaaagaatcttccataccctgttctggccaaaggtcttgagcaacatgagaatgtataactgaaaaaaaatttttataaattactccacttactagactcacatgaatatagtttaaaaatcttacctataaatttataccatctacataaataaaatggctttgcaaaataccacaggccctaattctttcacagacatacaaatgtaacaaaaatatagagaccaaaatacatctgtggaaaatttataaatgagttgtgtgcagtgtcccagatgagcacaatgtgaaaaaccacatagaagaaaaagagaagtctgataaatttacccaacacagcttttcctgcttctcactgtaacataatgcctttagaaagggcagcctggccagcatggcgaatccccatctctactaaaactacaaaatttagctgggtgtggaagtgtgtgcctgtaatcctagctactcaggaggctgaggctggagaatcgcttgaacctgggaggtggaggttgcagttagctgaggttgcaccagtacactccagcatgtcgggaggatagagtgaggctctgtctccaaaaaataaaaattaaaaggaaacagtgatgtgccatttacaaacacagtcttacgagataatctgtgaagagttaacaaaaattttgcaggccataagggaactgtgtgatgtagtcataaaaaagttgtgagaaaaagcagctattaagtgagaataataccatcagtgaatctgttctgccaaataaaaatatagaaactttccaaaataaacaagttttaaaaaagtatattggtactgcttatgtcctacatataaagggtgctgaaaatattttactgaaaataacatgattcaaaaaaacaccacataatcatacaaaaataattttctggaaaacatacacaaataaacaaaattagaatttctgagcattatcctagtggtgcaaaaaacatttctaattattctctgaaatttgaaagaaaaaagtatagaaataattataaatatctgttaatgaatatacaacacaaaaagacataactagcaatgtcaatgaaacttgagggaagatgaaaaagaatttttgtatgcaacttatttttttaccagattaaaatatattgttgtatttttcagaggttatatgtaatccccaaagtaccacaaacatattcgtataaatacacaaaagaggttgggtgctgtggttcatgccagtaatcccagcacttcgggaggccgaggcaggtggatcacaaggtcaagagattgagaccaccctggccaacatggtgaaaccccgtctctactaaaaatgcaaaaattagccaggcgtggtggcagatgcttgtagtcccagctactcagaaggctaaggcaggagaatcacttgaacccaggaggcaaaggttgcagtgagccgagatcatgccactgcactcccacctgggtgaaagaacaaaactccatctcagaaaagaaatttaatggttaaaaaagactggaagtagacattccatgcaaacattaatcagaggacagcataaacagtcaaaataatcatacacaagctccatcttaagtcaaaaagtataatattttataaaatgtacttgaaattaaaactccaaagaaacaaagaagaacatcaaaaaataatcgattcattaactgggaacctattacaaatttctctgtgtgtgtgtgagtgtgtgtgtgtgtatgtgtctcacattagtgttccaaatatataaagccaatattgacagaatggaagaaacacaaagaaagcagtattattatagaaagatattttaataccacactttctgtaacaaaaataaaacaagaatgttaataagggaatagactacttaaaggcagtataaaacaattattccgaacagagtgatggagaacattcctcaacaacatcagaatacatacccttctcaatagctcatataacattttccttgatagaccacatcttaggccacaaaggaagtcttaccaacatttttaaaggtaaaattccatgaactactttctatgaccaaaatgatatgagagtatactatgatgagaacaaaaatgaaaaatttacaaatacacagaaattaaacaaaacactcttaagtgtgctcttacacaaaagttgaaatagttaaattgtgaagaggtccattgtgctcaatgcaatttacatatttaatgcaatgttttccaaatttctcattgcatttttgaagaaatagaaacaacaaccccaaaagtatatagaatcccaagagactataaagtgcccaacaatcttcaaaaaaaagaaaaaaatgctggaggcatttaagttcttaattcaaaatacattacaaagctacagaattaaaatgatttgctattagtataaaggtaaaaaagtagacataaaatagaatgcagcacacatataaactttcacatatatggtcatataaggagtcatttacatactcataattattgcagcattgttactgtaagccaacaggtgaaagcaacccaaatttctttcaccaaatcattcagcagatgtaatttgaaatataaaaattgtgaggccaggtgtggtggctcaagcctgtaatcccagcactttgagagggtgaggcgggctgattacctgagactgagagttcaagaccagcctgaccaacatggagaaacctagtctctactaataatacaaaattagcgaggcgtcgagacacatgcttgtaatcccaggtacttggggggatgaggcagtagaatcgcttgaacctgggaggcagaggttgcggtgagccaagatcatgccattacactacagcctgggcaacaagggggaaactccatctaaaaaatgaaatagaaaaacgaaaaaaaattctggaatatcactcagtattcaaaaagaaggaaatattctgccaactataaatataaatcttgattgcattatgcaaaatgaaatgagtcagccacaaaaagagactgtatgagatatatgaaggagttacacttttagaaacaaagaacagagtgatatttgaaaagtgccataaaacagaaaaaactggggccaggcatggtggctcacacctgtaatttcagcactttgggaggccaaggcaggtggatcacctaagctcaggagtttgaaaccagcctggccaacatagcaaaactacgtctactaaaaatgcaaaaattagccaggcatggcagttggcacctgtaatcccagctactcaggaagctgaggcactaaaattgcttgaacctggaaggtggacgttgcagtgagctgagatcgtgccactgctctccagtatgggtgacagagcaagactctggaaaatttggtagacaatggaaaaattagtagttgtttaatatgtattaagatttagctttacaagataaaaatgttttagcaatatgttccatgacaatgtcacgataaactgaatatttaaaaatattttgtggtaaattttgttatgttttattgacaagtaaaaataaacaataatacctaaaagatacatagttatgatagttttaaattatattcaaaaccaaatgtgtttctcccatgcaaaaatcacatatattcacaaattaataggatgttgaaattacaagaatttcatgacttctcatctacacaggattaaaaaactattcacaacaaaccttcacaacaaatatacaagttataaaaaaaaacaaggataacatttttccaggcaaatagagataattctattggaaaagacatatggctaattcatatatgattttgctccacaatgtcttaaattgtacaaagttaaatattggcatgcacaattagaatatatactaaaaaatcaaaacacaattaacagatgtgttgtgacataccctcaaatacatatatatattttatatacaaaaatataaaattgcaaaataaaattaaaacatggaatgtaaaacttattagataccatcaactagatcaatatattcattaaggaagaagaatatgagaaaaaaataatagaggttacttgaagataaaaaagggtgagaactttccacattttgacgtaataaaagaaaaaattctaaccaataatatttgatttaaatttattttactttaaaaagaagatgaaaataaaaaaatccaagataaaggatgagggtgttcatcaccactagcacagttttatgaaaaaatgctacatgggggcaggcactgtgggctcatgactgtaatcttatagttttaggaggccaaggctgtcagaacactagagaccaggagtttcagatcacgctgagtaatccagggagactctgcatataaccaaaaaaatgctaaaatgagtcaattttgtttaaaaataaaatactggacagcatcataaaaccatacataaaacagagcgctctattaaatgcaaatatacaaatatagaactctttactatcataatgatgatgtatacaagtcttaaagctattctgtagagtatttaaaacagaaaaaccggcataaatgttaatatacaatataaaataatttttaatattaataacaaactgaaaaatatagaggtaaaatttttatattcaatttaagttgtcatgagatttaaatatattgttttaattttaagatgtttcatgtaaactccattttttaagatgatatggtttggccatgtcccaactcaagtctcatctttaattcccacatgttgtgggaggaaagtggtggaaggtaattgaatcatgggggcaggtcttttctgtgctgatctcacgacagtaaataagtctcatgaaatctgatggctttataaggcagagttttcctccacaagctctctttcttgtctgccaaccaggtgagacatgcctttcaccttccagcatgattgtaaggtctccccagtcatatgaaactgtaagtccaataaacctctttctgttgtaaattgcccagtctcgggttatatctttatcaccagcatgaaaacagactaatacacaagatggttatgaagacaatatttatagaaactatgcaaaacaaaatgtaaaaaataattgaagcacgtcactacacaattaaaataaaatttaaggcaataaaacaatatattaaaaaacccactgaggaatacataaaacaataacaataaaactaataacttcattttaataaataattttaaatataaattaattaaactacttaatagaaagaaatgtaatctcaggactttcggaggttaaggtgggctaattactggatctcagaagtttgagaccagcctcggcaatgtggcaaaactttgtctcaaccatacatacaaaaaacctagctgggtgtgatgctacacactacctgagaggctacacacaactacctgagaggctgaaatgacagaatcttctgagtttgggaggttgaggcttctgtgagccatgatcacaacactgcaaaccagcctggttgagagtgagacctatctcaaaaataaatgaataaacaagtaattaaatgaaattataaaaagaaaaaataaaatgccttagtggcttaagaaaaagccacctacaagggactcattttagcactgagttaaataggctgaaaaccacatggtgaaaaaaaaatttattttatgaaaatagtaactacaattgggtattagacataatatcctttaagtcaagtgctaacgtgagacaaacattgatagtatatattagtaaaatgaattgatttaccacaaatctataactattctttctttcttttcttctttccttctttccttctttttctttctttttctttctttctttctttctttgtttctttctttcctttctttatgtatgtgtatatataacatcaggctccaaaatatataaagcaaatattaacaaaagtaaagcaaaaaatacatagcaacataataattgtagacatcaagaccccattttccatcatagaaaactcacatagaaaaatcaattaaaaaacagaaaacctagacaacattatagactgtattattttgcatatagaggaatacttgagagtggataatttataaagaaataatgacttcaccatttctgcacatataaatacagataaatatttaatagggggataatgcctcctagaaaatgggtgaaaatatttacaaatcatatgtgataggagtcaatattcaaaaaatataaacaacttttaaaaccgaacaatagccaggtgcggtggctcacatctgtaatcccagcgctttgaaaggccgaggcaggcagatcacgaggtcaggtgttcaagaccagcctgatcaacatggcaaaactccatctctactaaaaatacaaaagttagccaggtgtggtggcatgcgcctgttatcccagctactcaggtgactgaggtgggagaatcacttgaaaccgggaggtggaggttacagcctaggcgacagagcaatactccatctcaaaacaaacaaacaaaacaataaagttgaataactttatttagaaataggccaataattgaaataaattttcatcaaaacatttgaaaggacacacaaaactaatttgtagagaaatgcataaaaatcacaatgaatgaaaaacaaaatcccctcacactcatttaaatggccactatcaattttttaaaaacaccaaacctgtcgatgatgcaataaaaatgaaacccttggccgcgcgtggtggctcaagcctgtaatcccagcactttgggaggccgaggcgggcaaatcatgagtcaggagttcaagaccagcctcaccaacatggtgaaaccccatcactgctaaaaatacaaagttagttgggttgattgtcggtggaaaataaggatgcacccattattttataacgttataaatgtacttcaaataattaaaaataaattatcaaatacagcaattccatttatgaatctatatctaaaatatgcaacataggaccttgaagacatgttcgatacaatgaaatattattcagccttaaaaaaaaatcttctcacatttaaagatacactctgagaatattatgtcaactgaaataagccataatgaaatgatggatgttatgatttcacttatttaagacatataaaatagtctcattcataaaaacagagtgtggaagggcggttctcaagggatggagagagtgtaaaatggataaacgttatttaatgatactgagttttagttttacaagatgtaaaatttcaagaagtcttttgcataacaatgtgaatatacatgacatgcctaaaatatacattttgtttttgtttttgttttcagactgggtctcaatctgtcacccaagattgtgtgcaatggcgcaattatggctcactgcagcctcagattcccagggtcaaataatcctgcccctcaatctctcaagtagctgggaccacaggtgcacaccaccgtgcctagctatttcttagaaaaaaaatattattagagagggtgtctccatattttgccgaggctggtctcaaacttttgggttcaagaaatccccctgtccttgcctctcaaaatcctggttttacagatgtgagccaccaccatgcctggccctgacatgtacatttaaatagatttaagaaggtaaattatgttatgtgtttttacaacatttttttttttaaaactggaaaaaatacagaattataaatctttttaaaaattaccttcggatcacaaaagtgtttctctcacacaaaggaaatacatattcatcattaaacacatggtgaaaataagactatttccaaggccactcacttagaaaagataaaaccaacattgaaaatgagctaagaggcagggcaaggtggctcatgcctgtaatcccagcatttttggtggccaacgtgggcagatcatctgagatcagaaattccagaccagcatgacaaacatggagaaagcccatctttactaaaaaaaaaaaaaaaatacaaaagtatctgggtgtggtggcatatacctgtaatcccagctactaaggagcctgaggcaggagaatcacttgaaccagggaggcggaggttgcagtgagacgagatcctgcattgcactccaggctcagcaacaagagcaaaactccatttccaaaaaaaaaaaagaaagaaaatgagctaagaatgtatgaatgtatacaagataaggtatagccaaaattggggtcatatttgcagataaaaacacacacatatatataatttgattgtgatacacatggctcatttatcttttaattaaaacttacattaacttaaagtatacaaacaactgctaattgtctaaaattataatacttaaataatagcaatagacacaataaactgatgttaacaaacttacactaaaaagcacactaactgcaagtacaactgcaagacaataataacagaaatgcttagtcataaaatctagttggcaacattaatgtacattaacaaataatttgtctagataactgcaatgtttgactgtaactgtgcattcatggaaggcaggcatttgaaattactggcatccattttatggcaataaaatttcagagaaaatgcagaacaatcataaatgggagatgctaatgagaaacttttaatagatttaagcatttaaaaaaactagtgccaatttttacgttttaaatatacgctatttttaaacaaaatataactactgtaatccaagtttagaagcaaagaaaatccttacactgcttttatatatatatacacatatatatgtatatatatacacatatggtcagagcctcctatataaaatgaatatttggggaataaattatgttattatttagatataggctgataaatttgttgaaaattctataattcctttttgtctgcctgcacactaattatctaatttaattcaggcacaacatgtaaattctagtatagtaccctaaatttctgaatctaaaattacagacaaatttgaagtagaaaatagaaagtaaaaatgtatatggagagtgacattaataagatttttttaaaaaggtgccctacttgcttatcccctgaaagcaagaaaatttgtcagccattcctgataaaaacgcctttatgagagaaccaggcatcatggttcacacctgtaatgacaactacgtggcaaaataaagtaggagaattgcctgcagtcaaaatattaagacctttctgggttatgtaggaagacccccatttcaaaaataagtgcttttaaaagagctctgagatccaggaagggagctgtgaaactctgctgaagcccaagactgaaggtaattctgtttagaagacaggccctcattcaggtggcaaactacaggactactgtttttggctacagacaagaaaacgttccacctaacttggttccactgagaattttaaacttactctgtaacaatcccaaactcttcccagccatagtctgggggaggtcttgcccttccagaggcctggaggaagacctgcatttatagccatgcagtaggcctacagacctttgcctttactgtggtccctgaagcagttccatgatgcagttccagctccctgagccacagttcatggccggttctgcccatgtagaaacccaaagtgacctgggaaaattctctcttgtacttggtgaaagccatgctcatccacatcctgatataaagcccaccatatgcaggcctgactgcagaaacctgcccttgggtttgccctgcagagcacctaagtcctgaaggatattcactctgtccaaaaattaaatgagaattacaactatccaagccccttttaacaagaccacttaaatggattcttgtgcaaatccagaaggcttaaaaccaacctaaaacccctcttcactacaaacccagaggcattctatcactctggtggcctaataaaaatagatttttcctttctgaaaccagtttataaaatcctgaagaggtgtttgctccttcaaatttacacacaccaatgcaaaactattgtttcttattgtcaatgcttctattttaacattgcactgaaggcatgtgaaagaagaaatagtcaaaagaaaaatttaaagtcattgaagttgaagtgcagtaagtaaaacgtttgtttgtagatcatgtaatattaatatataaaaaataaaaagtacataaaaacctgtttaaactaatgaatacactcagttaattagcaaaatataaaattaacatacaattctgagtaatcattccatacacttaaaacaaactctctgacagaggaaaaaacaatcttatttatgatagcataaaataatccattttagaacaaatttaattaagcagctcataaatctttttttttttttgagacaagagtcttgctctgtcacccaagctggagtgcagtggcataatctcggctcactgcaacctccacctcccgggatcaagcaattctccttcgtcagcctcctgagtagctgggattacaggtgcccgccaccatgcccagctaatttttgtatttttagtagagacggggtttcaccatctcactggtcttgaactcctgatctcatgatccacccgcctcggcctcccaaagtgctggaattacaggagtgagccaccaagccaggccaagagctcataaatcttttaaatgaaagatatatcaataaaaaaattaggaaacaaataaatttaaaaatattttatttctattgaaagaataagaattgtgaaaatgccatattatccaaagtgatctctagattcaataaactccctatcaaaattccagatgtgatgcaaaaagagaacttaaaaatagtttaggccaggcatggtggcacacgcctgtgttcccagcactttgggaaggcaaggtgggcagatcgcctgaggtcaggagtttgaaaccagcctggccaacatgatgaaacttcatctttactaaaaatacaaagtattagccgggtgtggtggcgtgtgcctgtaaccccagctgctcaggaagctgaggcaggagaatcacttgaacctgtgaggcagaggttgcagtgagctgagattgcgccactgcactccaactttggcaacaaaagcaaaggtgcctctcaaataaaataaaataacataaaacaaaataaaatggtttaacagagtatctcaaaattatgcagatatgtatctgtccacaaaaacaagaagtcagattgtgcactcttttatatgccatgaacagtactttggctgtcactgtaaacttcaacgaagatcactgaagggaaagtagaattcttagagattttataagcataagcagaagatggccctatgtgagagtgtaatttttaaacaatttcaggcttcccagaaactatttccttaggaacacagcttcccaaatcgctttaaagacttactttcttcttgactttggacctctcatccatgtcgtctgttgtattcactctcacctacctggggtttcatccaccatctcatgtcgcttcatattccagggctcttttccttgctccagacaggtgatcaggtctggcttagagaaagcaatacctgttttattaaaaatagctaacatgaattttgttcatattctccaattaccgacttagtaatgtgctcagtaaaaaggatataatagattattctaataagtttatcccaatatactaatttataacagaaatttttaaatatttagaaaatattttaattttgtaggttcttaatttcagtgcctgccactgctgaataaaaaaattggtgaagcagatagattttaaggtgtgaataatattttatgccactaagcttctgaaattaccactaatctaaaatgaaggacacagatcagctcaggaatgtggaaagttcaggtcaagatgaaacatcttcaataaattttttctaaacagacaactccccaggattttcttgataacagaaatatgaaagcataagtaccagaaaacattctacaaagagaaatgaaatttttattttatattgaggaattttgtattaaagttatcctcacccaggaaggccaggtttatgtagttctctaacatcatcttcctatataaattcttctgtgcagtgtccaggtactgccactcctccagagagaattctatggccacatccctaaatgtcaacagtccctggaaaacacacacaaacacacatatttacaaagtggctatgaatagaattttttatttgacacaaggtaaaatcagaaagtgaatagaactggttctgacttaaaagaatgattgaaactatccaataaaataattgtcaacacacaaacgttttctaaggtattctctaactatgagataagagagtggcataatatccacaacctcagtgtatatgtgatacttgtctgaatgacaaaagtgtaaaattgagggcatatcacgaacatgtacatttttgagtgctatatttacataatagagaattagttgtgtatatttttcagaagaaaaagacatagtttatatatttcagacaaaatagacatgttgagttagacggtaccactcaaattttaatgtgtacaataaactggacatcttattaaggcagattattttttcaggagatctgaaataaagtctgaggtactaggctctaccaagctcaccagttatgccaatggtttggcaccaaaatactattttgtcaaacatccagtaagtggaagagcctgtgttttttttcagtttttctggcctgtaaacaaagatgagaatttcatttaccaaagaaagataaatgcaaagaaaacctttaaaaaaaaaaaaagcagctgccagattaaatgtgatggtttatgcacatcaactgcataaaaatacttaatgaagagaaaaataactctatagtgaaaaactctgtaagagagtttattaagtgagttattaacatcaactgcactaggaaaactttttatagtgtgctgatccacccagaaggacacagcatcactactgagatatggcccctactaaattactgtctgaatttaaccataagaaaacatcatttttatggaaagtacaagatacaggtatcttccatgttctacaatttttttttttttttttttttttgagacagagtctcgttctgtcgcccaggctggagtgcagtggcatgatctgggctcactgcgagctctgcctcccgggttcacgtcattctcctgcctcagcctcccgagtagctgggactacagacgccggccaccaagctaactttttgtatttttagtagagacggggtttcaccgtgttagccaggatggtctcgatctcctcgcctcgtgatccgcccacctcggcctcccaaagtgctgggattacaggcgtgagccactgtgcccggcctatgttctaacatttttaacagtcattttaagtagttctttctttagcaccctaataagcagttatctcctggtattttttcagaactttccaggtaataaatgccaacctatttaaatgagcattttcttaaccgtgtaatgcatagagtttgaacacagtataagaaattcttcttcaaatgtttagctagcttaagtttctttgcccttctgttccctgttttcaaggccagactttcttattctgtatgttccccctgccctggtaaacaaccttctcccagtttttatctatggagcccacattccaaatctattatcgactctgtgaatttcccctcccatcgcaatggctacttccgccgaaactgatcttcctgccttcccaaccgtataactgcattcctgcatttttcaagttagccaaatgggtttagtttagattatgcagtccaactccagccagcggaggcaggacacagtaacaagaaaaagctgcatcagaggtaataaaaaacccctactttcctttgttcatgtgcaccctcctgcagcgtaagctttaatttccatatcagagttattaacttggtttttgaaactaaaactaagtgttagaaacattcagcaaaattactcaaacacagtgttcatgtaacggaagaacattttaaggcgcttacactttatacctcaaagaatagcaaaagtatttattcctttcaggcaataaatgtattattttattatttgtattaaaactcatgtaggaaacaattagtcagccaggtgcggtggcttacgtctgtaatttcagcactttgggaggctgaggtgggtggatgacctgaagtcaggagttcgagaccagccgggccaatgtggtgaaatccccatctctactaaaaatacaaaaattagccgggcatggtggtggaagcctgtaattcaatctactcgggaagctgaggcaggagaatcgcttggaccagggaggcagaggctgcagtgagctgagattgcactattgcactccaccttgggcaacaagagcaaaactccgtttcaaaaaaaaaaaaaattagtcacttggaaacacttataggaggcaccaattttcattacataaaatttagcaataaactcaaaaatcaaaataacaggatacagggccaggcatggtggctcacgcctgtaatcccagcactttcggaagtcgaggtggatgtatcacttgaggccaggagttcaagaccggcctaacatggtgaaaacccatctctgctaaaaacacaaaacgtagccgggtgtggtggcacatgtttgtagtgccagctactcaggaggctgaggcaggagaatcgcttgaacctgggaagcgaaagtggcagtgagctgagattgcactccagcctgggcatcgttgtgagactctatcttaaaaaaaaacacacacacacacaaaaacaggatatagaacaaagatattcacggtcaaaaatttaccctgctaacaaaaggaactgaagttttcaggaatctatgtaactaaccagttaccaaccacattttgtgtgtgtgtgtgtggaaatgtattcattgtctatagctgaaattgaagagaaatttttctttgttttcttccttggtagctaccattctaaaagctagatggactgtatgaaatcactctgccataaaaacacacacctgagaaaatttctaaactcactctgagaaagaaaaaagtaagtgaaaattttcaacaaacaaaatgtattattagatattaatgtttttaagactcacctgccaggcgcggtggctcacgcctgtaatcccagcactttgggaggctgaggagggcgaatcatctgaggtcaggagttcgagaccagcctgaccaacatggagaaaccctgtctttactaaaaatataaaaaattagccgggcttggcagcatatgcctgtaatcccagctactcaggaggctgaagcaagagaatcacttgaacccaggaggtggaggttgcagtgagccaagatggcaccattgcactcctgcctgggcaacaagagtgaaactgtctcaattaaaaaaaaaaaaaagactcaccttttttatgtcctttgtaaatattttcttacctttcaagctctactactaaaatgcaatatacaattaaaaaaaaacagctgggcacagtggctaacacctgtaatctcagcactttggaaggcccaggcaggtaagtcacttgaggccagaagtttgagatcagcctggctaacatggtgaaactctgactctactaaatatacaaaacccagcagggagtggtggtcaacacctgtactcccagctacttgggaggctgaagcatcacccgaacttgggatttagaggtttcagtgagcagagatggcaccacttcactccagcctgggtgacagaggaaaactctgtcttaaaaaataaataaataaaccttaggtaaattaagtgaataaatcttttcaaggtacagatatgtcttattcatgtgtcacatcaggccattccgttacttgagagattgccccaccccaccctgcacacttaagtgctcaataaccctgtctcaggagactctgaactatgacccagagagtgcctcaggcacattttactctgcaagttcttacaccatctcaatggagtcagctttttggggtttggtggttttcttgtctttggagtgctgattttttttctagaatttttttactgtttttcttgtactatttttctgtcccctaaaggaatccaggacacagaaattatttttctcctcaatactggtatctgattggctgaccagcaatgagtctccaagaaatgaaagttgggttggatgaagacaatattaatgtctcaaggggttaactttgaaaaaaaaaaaaagtacaccaggaaatgcctcttagcctgagggcatccatgtgtgcacttgagaagctacactcaatacctcaggttgccctatgagcaaataagccccagggctgatattcactagagactctagcagacatagttatggtaggtattgtggtttttcccatacaatactgaaatccaggtccaagaaaaccggaagggtgactgaaaacacatcaccctataatgtttctaaaaaaaaaacttgacccaaaaacattctgataagatatctgtgtcaacggaaaatagaaggaaaaaaaacccacagagatattttacaatagtgtcagattattctttgcttaactctcataggaaatatgtacaaaaaaaatctttttaaatgtgccatcaaatgctttgtcaaaaaataattaattagccaggggcagtggctcaggtctgtaatcccagctctttgggaggcagaggcaggtggacttcttgaagccagaagttcaagaccagtctggccagtatagtgaaatcccgtctctaccaaaaatacaaaaattagccaggcatgctggcgagtgcctgtaattccagctacttgagagattgagacaagagaattgtgccgggcgcggtggctcatgcctgtaatcccagcactttgggaggcagaggtgggcggatcacgaggtcaggagatcgagaccatcctggctaacacagtgaaaccccgtctctactaaaaatacaaaaaattagctggggtcccagctactcgcgaggctgaggcaggagaatggcatgaacccgggaggcgaagcttgcagtgagccaagattgcgccactgcactccagcctgggcgacagagcgagactccgtgtcaaaaaaaaaaaaaaaacaaaacaaacaaacaaacaaaaaacagaatcgtttgagcccaggaagtggaggctgcagtgagcctagatgaagccactgcactccagcctgggcaacagagcaaggctctatctcaaaagttaaaaaaaaaaaaagattaattaaaataggtattaaaatgtatactaaatgacaaattgttgataaagtgaattagggaggggaaattggtatttgggaatgtcagacgaaactgaaaatttagtattttactgcaagccagagtcagactggaggaataggtgatgaggagtgaacttgaggccctgcttgtgacacgtgtgaaaaattcagaaaaaaaatcagtcccctgtggagtgtgaaaatcagtaagaggcaggaaattagattgaggtggctctagtccctggatttctacttcaaaaaaaaaaaaaaatctaaactgaagagcatttattggtaaataactacattggaggaaacaaaattcaggcttaaccaactataaactgccaattaagctgattacataaccagctttaccttgattataaaaattaagaaactatgctgggcgcagtggctcacgcctgtaatcccagcactttggaaggccgaggtgggtggatcatctgaggtcaggagttccagaccagcctgaccaacatggtgaaaccctgtctctacaaaaaataaaaaaaaaaaaaatggccaaatgtggtggcgagcgcctgtagtcccaactactagcgaggctgaggcagaagaaacgcttgaacctgggaggcggggattggggtgagccactgcactccagcctgagtaacagagagactttgtctcaaaaaatagaaaatcaaaacaaaacaacaaaaacaaaaaactacataaccgtaccaagccaattattgaatttggttttcttataaaaacctttccttcaagcgccttccatgaattgcaaattacaaactacagcagggtgctgctcaacaatttttgaatcaccctttgattaagttatttaatattttcgtggtgatgcccataaatttttaatagaaaaaaagggcctgggaatcccacggacaaaaagctcttcccattcgtgaacctgcaccccgaatcaggattctgccctgaccttcctcccatggtacttgcacaatctgggagagatgcggggctgcgggtccagagctgcccagagagggctccaggccaggacatggtcactgcgcagggaagagacaggccgtctggggggcccggctgtcagtgcagccgccatcttatggctgaaggggactgaggccgagctgggcaaggagaactctgggcgcagattgtggagatgactgcggagaggcctgagtcccatcaaccgcttcccaccggttccaaccaggctcgtcccttctctcgggatgtcggactcagcactttcaccatttctaggcttccagggggtcctcgtgtctcagctgtgaatgtccaatacctgcaggtcacagggccacagaggctgggcctctaaaagcagaagacacagaggaatgaggacaacaccaggaggaacgactgaagccagaggcaaaggccccaccaaataccggaagccgccctgttccctccagctgtgtgtctgattggacagttcccaggacagcgtccctgattggataacgtttaagacccccgccttctcaggccctgagtgatggaagatgtggtcagaggttggactgaaagaagaaagattgacagcctaagttgtagccttttcaggcaaggtttcttccctgagctgagccaggccaatcccagagcacgggaaaattctctctcttctttgctctctctttttttcaatgtattcaaaatgtaaactttttttttttgaaacggagtttcgctcttgtttctcaggctggagtgcaatggcacgatctcggctcactgcaactttcgcctgctgggattaagcgattctgctgcctcagcctccagagtagctgggactacaggtgcacaacaccacacccgctaatttttgtatttttagtagagacgggatttctccatgttagccaggctggtttcggccttctgatctcaggagatgcacccgcctcagcctcccaaagtgctgggattacaggcgtgattcaccacatccgccaactcgatattatctttaaagcaaaattaggaatgcctctgttctccagatattgggatatctagacagtcctaagtctggttctgcttagtaaacattaattcgttcccttaatcgtaaacatctagaggctaggaatgtctaacttgctgagaatgcagcccagcaagtctcagcatcattttcctagccctctctcaaaatggagtagctctggtataaatgcttctgacatattttcccccttgttttacaagaggatccttaatcctaagagttgcagagagacaaagattcaccttctgtaaatttttcaggctgagtaggggcgatgatattcctgactaactgttggggcctcttgcattcagagtagagagaaactcagtcagacagtgtttgtatagtgaaggtcgttcataacttcaagttccaaaaaaaggtgattactggaagactaataaatgtccaattcaagaaagcatttagtgagcttgtcttgcatttctacacaaagagtaaaaccacaatatatttcacaacagcaaagcaaaattagtaaaattatcccaggtaaactaaacaggaaggctctgcaagaagtgggcagttgttggaaccaagctgatacgtggttgactgatagtgcataaaaatggcagagatatgagtgcttaaaacttttatagcctgggtaatattatgtgaatagtctgaagcatacacacaacatttggttttgatcaaagcacaggtttccttttgggtctctgttaaaatgtctgcatgcccaacagtttgtttgattatgtagagaggatgaagtctgtgctcactcagtaaataagttactctctgcatgattccaacttatacccaaaagtagaatgccagtctatatctttatgttacctatccctttcatttcttctgaacaggagtcaaaggtcactggctcatgggaataaacaggatcagtctcttgtgttccgccagcctataggacttcataagagacaggtttaatttgagataagtggacccagctgtttattcccagaatttttaactgcagttggggtactaaagagaacttggtaaggtcccttccattttggggaaagttgacctgctggggatccttctttccaagtttttcataggaccaaatttcctggctgggttataaaaagattatcttccttagttgggaaagggagtctttgattttcatattcagagtgtgttttgtgcttgtcacataattctgtagcttgaaagtatctgtgtctattagaaggtatgtagctgagaaaggccttgcatgcattatttcaaaagagctgagctgcagatttcccttagcggccactggaatctgtaataaggctacagatagtaaagacagtgaggtctttgatgtttcttggcatagcatagcaagagtcctcttttgagtttgattagctatttttactttcaccaaagactgtggccttcatgctgagtgaaggcattactaaatttctagggctcaagatatgttctgtgtaattgtcactgtgaaagataggcctttatctctctgtaagctcttaggcagcccaaatctaggaattatttctttttcttttctttctttctttcttttgtttttgagatggattttctctcttgttgcccaggctagagtgcagtgacatgatcttagctcactgcaacctccgcctccctggttcaaacaattctcctgtttcagcctcctgagtagctgggattagagatgcccgccaccatgcctggctaattttttatatttttagtagagacagggatttcatcatgttggccaggctggtctccaactcctgacctcaggtgatccacccgccttggcctcccaaagtgcagggattacaggcataagccaccgtgccaggcgaaattatttcgtttagtaggaatttaggaacctcaattgccttttcagaccgggtaggaaaagccttgatccaaacagtaaatgtgtcaatgaatactaataaatatttaaaccttttacatgggggcatctaagtatagtctatttgccatctttaccacggtacattcctctatgctgaacaggccttactaaaggaggagataaacattggttggtcatttgcgttattccaggcacatagttcacaggctcgaattaccgggtttactgttttaagtaatcctttttctataaaaggccaacattaattgaaacagggaatctcttcccaaatgaacagagtcatacaaatgtttaactatttttcactgattagcacctcgcatcaacagtttatcaggagtgtctagcaaaatgcctgatatttcaataagcatccccctgtcatccactggtgtcctttagcttctaggactccttgtacttggtgtgggtttaaacctcagggtgttgttctaaagccagtttattggctttatctaccaaaagagaagttgctgcaactgccctgaggcatccaggcatgacaagaaagttatgtaagaaaaccaaagtctctaaaaaacagcttacagaatagataaaatggcatctatgggcttctcaatctatccctgtgaccatacagttttggggtgacagaaacccattataatgggtcaaaacagagtaagcagtacagaagaaagtttatatatatatatatattttttttttgagatagagtcttgctctgtttcttaggtggagtgcagtggcacaatctcagcttactgcaacctctacctctcgggttcaagcagtttctggctttttttttttttgcatttttattagagatgggaattcaccatgttggccaggctagtcttgaactcctgacctcaagttatccacccaccttggcctcccaatatactagaattataggtgtgagtcaccatgcctggtgaaagttaatattcttacctgccatggtgaaggttaccaaggcttctccagataatatggctagttgtctgattggagctttggtggaaggtctcgggccccatcacttttgggcacttgcctggctgtttaactcatcattagttagggtgccgatggctctcttcagaacactggattatccctcttccaatggccagttttcttacagtgtgcaccctgatttatgcccaaggcacagtgactcagatggccagctttggtcttcccacctttcagtttctattgttcaggccaagactcaggaggcagccccatgtgggaggttagcttaaggttgcaaccaagagctgcaccttgtgggaggtccttcttgctctttttgcttcctctactttttccctgttattaaaaactaaaaatgccatatccaaagctgttccatagaagtttggggacccacagctgcttttactagttttctatggtatcaggggcagactgggttataaaatggactcccagaagtgtttatcttttccttgaggcaggatcactgttagtatatctcctggttgcctcaactaaacactattgaaacagagctggattctcatctttgccctgagaaacttcgttaaccttttcacttttaacaggctatttcatgcctttcttcatctcttccaaaaaacaagtgaccatatgatctcttctcccaagtcctcactgcccctgtgatagttccactctagaacttgatctggaactgctatacctcctgtctgatatatattatggttctggttgtgagccaatatctcatctgcatgggtcctagctgtcctgaaaatgcattgtttcttttccactgtataacacagagacaacaaaacatacagatcctgccaagttaaactagagatcaaagttaacttctcaaactcatctgtgaattttcctggatattcagagaaataaccaaacttgtcttatatagagccaaaccagacatagaaaaggggccatgtcttctcacaggcctttttctccatttgcaacctctctaagtggacaaacatttccctttggaggttgataggcagctccactatgagtagtactcactgagctcagttattcaaggagtggtgggtatagaatgggactagatgggtaaggaagagggatgaagggtcctcaatagaactttcaggtggactaggggtagaaaggatggacacagctgaacctttagagctgacagaaagaggttctgtttcaccccaaaatgcccactgaaccaagtggccgggggtgggggggggcttgcaataaaggatcagcttgtctgtctaaatttttttcttctacttctctcaggaaacatgtccatgcctgctgcagggtttcattctgactgagcagcaaaaatgcttgaacatgaagtattttatcctattttccctaccacttacagaacaaatcgagttgaactacagtataagtacccattagaggcaatttttcttgtatctttctgaaattgtttgctgcttttccatgcagatcatccttaagaaagtgtacaatcttagcccaatctgcaatctctgttcctgaggttttagtaacatgatgtttctcttttgttgtagacagcactgaagatgagttttcatcccagggaacagaaagacaaaaggtcaagatgtgcttcaaaaagctggtgaggggcattgggtcaggaaaggccaggctgtctaagcattcagagaccccctgtgcaactgtccttgcaattaggagccaggccccaaaaaccttcccactgcgtgtgtctttgacctgtgctaggtcctgctgttgattagtgttccctactgagcagttaacctatggtttgagtatttacacccaggagaatgttgcaggccagccctcagtcaacttaaaataatcaaaaaggttaaaatgtaatctgaaatacatttactcaaggtcagatattgaggatgaccaccaggaaaacaaatttaagttgccctggatatatatttcaattagcagccattcaaagcaagtcttttcaaaaaaatgagaaggcagttcctaagttgttaaccaagaattcatatttaaatgcataagctattgattggctatatatattcttttgttttacaaattccagaaataatggatgagactgctagtcagaaacaaaatgtctataaacaattgcccctaatcccagcattctgggaggcctaagtgggcggatcacctgaggccagcaattggagaccagcctggtcaaaatggtaaaaccccatctctactaaatatacaaaaattagctgggtgtggtttcatgtgcctgtaatcccagctacttgtgaggctgagacagaagaatcatttgaactcaggaggcagaggttgtaatgaaccaagatcatgccactgcagtccagcctgggtgacaaagtgagacttcatctcaaacaaacacacaaaaaaagaatttcccctgtgtaaagttccacactttcatctccctggtcttgataaattgtgcagaccttacagagctgagactgctctgagctatttttattttcacctccttgctccggacacatgaactattaacaataaaaagaatttacataagaatcttggcaagccacaagaataatgccaggaggtgacctccaggaacctggctgtcaccttcttttcccaccttaccctccactcctcttacacacacacaccctggatcacaagaccaacaaaaccactccatcagccacagacagagaagccacagaagaacccagaaccactgcatggcccccttggaccaccctagaatgaacagccattgttaacattcaggagccgtttattcccatcttcacactacactaaataactttcaagagtcacaagataaactggctgaaagctgatgcttggaacatcccacatcccccaggagctcagtgctgcagtctcaggtacaaacctgcccatcagccattcaaatgaaacaattgttatcaagagagcagagtccctgcaatggtccattaatttagaaagtttattttgccacagttaagtaggagcctgtgacacagcctcaggaggtcctgatgaaatgttcccagggtggttggggtacagtttcttatacattttagaaagtcatgagacatcaatcaatatgtttaagatgtacattggtttagtcaggtatgatgggaaaacttgaggttggggcttctgcatcacaagtagataagagaaaaaagaataaatgtatttgagcccttgataagtctcccactgagtacacaatttagtctggctcagtgaatctgcattttgatattaacaatagagcagagaaagtaagcagatatgtatttgtctcaggtgagcctcagagggatgactttgagttctgtctgtcgtctactcagtagaaatattcttgtcagcaaattgtgaggtaggtgtatagcttttttatctgcatagctatcttatttaagaataaaatagaagacagctttgcttgacatagtttccagcttgacttttctattggattagtaattttgacatcctgagatttatttttctttcacagcggggaacttttgattatcaagtgtatctgtttaaacttgacaataaaacaatgtatctattcagaagtaacaaatagaggttaatggaaaacttataaaacaaatataactatttgtctttataatctttcacaatagcccatcttaggtcttccatttcttattcactataatttaaataaaattttttcataatgttatagttgatctctttgtctgcggcattaaaacgagggtgattccatcttgaatagtgtcaggtaaaatgaggctgagacctattgggctgcatcctcaggttaggcattcttagtcacaggatgagataggaggtcagcacaacttacactgtatttagcaatatgtcacaatcatccctgtaagcagggtgcaggcacaatacaggagtcagatatttaggtcatggatgcagagatatgtcacagagtccccaggggcagggtcaagaaaggagctttctattccctaggagttgagcccaccaatatatcacaatacccaaaatatgtgagacccaccccccccaaaaaataaagagaatcacatcaccaaggtgctgggtcaggtgatatgttgcaattgccatttgtggcagactccagccataagaacagagtcacaacacctaagtgataaaacgatatttcataatacccttctgaaaacagtccatgcagaagactcatattacgtaggtgctggtttcagccatacatcacaatgcacaatgtatgcagagaccaggcaaaaaaatgagtcacatcttgggcagagccaaagcagtaaatgagagtcacatcacctaggttctgggtacagaaatgtcacagtaccctctgaggaaagagccctggcagaaaagtcacatcatctaggtgagagacccagagatatgtcacaatgcaccctgtgagtagggctcagaaagaagagaaagatcacataacctaagagctggacccagctacatatcacaaccaccttagtgggcagggccaaagcatgagaagagccacatcatgtaagtacttgaccaagtgatatgtcacaaccttcactgtggacaggccccaggaaagagagtagagtcacatcatctaggtgatgggcccagagatatgttacaataacttctgtggacagggaccagacagaagaatgacatagcctgtgtgctgatctcagggataagtcactctcttttatgggagcatggccgtgagaggaaaggagaatcacatcttctaagtgctgcccccagagataagtcacaatctctcctataggccaaacccaagtaaaagagtcatagcactaagatggtaggttcacagatatgtcactatgcctgctgtgagcagagtttcaacagacggctcacattaccttgttcagtccagcagtatgtcatgatctacattgtgagcagaacctatttagaagagaagactcacttcagctaggtgctgggaccagtaatagaaaaaaaatcatttatgtgtgaagggacctggtagaaaaagagagtcacattacttcagtgattggtacagaggtgggtcataatgcttcctgtaggcaggacccaggaaggagagttacatcacctggatgttggacatagcaatatgtcacaataatccataattgcagggcacaatcaggagagtcacataaccaaggtgtgggtctcagtcacatgtcacaaagccctctgtgggcagtgtcaaggcatatgtacagtcataccacctaggtgttgggtccagcgatatgtcacaatccaatctataggctgggcactaggcaagagaatcaaattactcaggtgctggtcagaggtgtatttcacaattacagttgcagtaaatgtagggaaaaattaacaatcctgcacatgacccatttctaggtattagaatcaacaccctttgtaagttgagtttgagtacatcagttacaatctcaatggtggactgaatacatgtataagagtctcaatctttgctgtgaactgtgtccccagtgaagtcaaaacctcactggtatgttgaatcttggtctgagactcatcaacccacatatagactgaatccatgtgtgagagtcaatttttcaacttttggctacctccaggtgtgagaatcacaacttcaacagtgagctgtgttcatgtggaaagatgtcaatctttactgtttgctgggtgtgcgtataagtgtcacaatgtcacctgtgatggacctcattataaaactctctgtaccacctgaggtatttatacaatatgcatgatagtcacaattttctctgagactttttcctagtatggactcataattgtacctgtggaactaagcccatgtatgcgactcaacagctctccaagtagctgggtccagagagagagtgttcacctgcctatgacctgggtttagaaatgagtcaccatgtgaactgtgatggcatgatcacacatgacagtcagaatttttactatggactgcattcacctgtgaaattcaggatctctccagtgggcatcacattctctgtaccatcaaaacactttatacaaaatgtgaaagaatagtaatcctctatgatgttattatctagagaagacccaggaatatacccatttctccaagtttagttacaagtgccagtatctctccttttggctgattcatggtattagtgtcaacatcacaactgtgagcttggctaaggtatatgtcgcaacccaaactgtagaaagaaaacaggagagtagcatcacctgggtgctgggacagaaatatgttacaatttttttagggcaggggccaagcagagagtcatatcacttggttgcctggccagggttatgttacaattctcttccaaaagcaaggcacagaaagcaaagtcacattaattgggtaatggactcagctatatgtcacaattttctctgcagttaagacatgtgtacaagaaaatcaccacctggttgctgaactcagaggcatgccacaatcttctgtgtgggcatggtgcagatggaagaggagagtcacacctccaaagtaatggatgaagagctatgtcacaaggcctcttgtaggcagagcccaagcaagagcctttcacccacttggtttgacccagcaatatgtcttaatacctaaaatacacagggccgatttgaaagatgagagtgataaggcctggcaaaatggctgacacccataagttcaataccttgggaggctgaggtgggcagatttcttgaggtcagcagttcgagaccagcctggccaacatggtgaaaccctgccgttactaaaaatacaaaaattagccagttgtgggtgtgcacacctgtaatcccagctactcaggaggctgaggcaggagaatcacttgaacctgggaggtggagtttgcagtgagccaagatgatgctactgcactgcagcctgggtgacagtgtgagactccatctcaaaaaaaaaaaaaaaaagaaagaaagaaagagggatatcactcgatgctggggccagtgattttacaatcccccctttatacagggctcaagtagaaaaggacagttaaatcacctaggtgataaacaaaatatgtcataatttccttatcagaagggctcatgggggagagtcacatcacctagctgttggacacagccatacttcaatatacacaattttaaatatacataatatacaatttgtatattgaaatatggttgggtccaacacctagctgatgtgactctcctgcataagccctaccaacaggggacatatgacatattattttatttatcacctaagtgatgtaactcttctttctcacctgaaccctgtagaaggagaggagagtcacatcaccaaggtgctgggcccagtgatatatcacaatccctccttgggcagagcccaagcactagaaaagagtaacatcagcttattgctaggtcagtaaaatatgggacaaaactccctaaaaaacaaaaggcccatgcagcagtctacctaatttagagcttcagagatatgtcaaaatgccctatgtgggtgaagttcaggtcaaagagaaatgttatataacctagggccttcacctagttatatgtcacagtcaccccagtgggcaatgctcaggcatggggaaaatgttaagtaggtgctgagacaagtgatctgtcataatccccactgttgacaggtctcagagacaaaaaaaaaaaaaaaaaagtcatatcatctagtttagtgggccagggacattcactatgtcctctgtagacaggtatgagacagaaaaattacatcacctgtatactgtgcctagggactagtcactctcccttctgtggtcagggcccaggtaggagcaaagggtaacatcatgtaggtgcttggcccagatatgttacaacgtcccctatggaaaagcccatgtaaaagtggagagtaacatcaaatagatgatgggtccaggaatgtggcaaaatgtctcctgtagccagggtctaggtaggagattcacatcacatgggtgttagacccagcaatatgttacaacagcccatgtgggcagggcacataaatgacaaacacattacctgggtgcagagaccagtgatatgtcacaatgccctctttggcagcaccaaggcatgagtacagggtcacatcatccacatacttgttccaacaatatgtcccaatcccatctgtgcactggccccaggcaggagagtcaaatcactcaggctatgtgcagagacatgtttgacaatcacacatgcagaaaggctcagggataacatgaataatttttcacatattcccatcctaggtatgagagtcaataccaggccgggcatggtggctcatgcctgtaatcccagcactttgggaggctgaggtgggtggatcacaaggtcaggagttcgagaccatcctggccaacatggtgaaaccctgtctctactaaaaatacaaaaattagctgggcatggttccgtgcactgtagtcccagctactcgggaggctggggcaggagaatcgcttgaacccaggaggtggagcttgcagtgagcctagatcgtgccactgcactccagcctggtgacagagtgagactctgctccaaaaaaaaaaaaaaaaaaaaaaaaaaaaaagagagagtcaagaccatttggaggttgggtctaagtacacaaatcacaatctcaatgtggatggattcctgaataagagcctcaatctctccttcagactgggtcttctcagtaaaatcatagcctcagagttgtgctgaatcttggtctgaattaccagcccagatgtggaccagatccacatacgagagtcaatgttgcaactttccactccctccagggttgagattcagaacttcagaagtaggttgtgtttatctaaaaggatggcgtagttactgctgactggttttgagtaccagtatcacaatgtcaccagtgtgcttggtcatgtaagggcattcaatgtattactgagggctttattgccaggtgtgtcccacagattctggtctatggattaaattagtactcagacacaggtatgcagtgtaagagcagctaagggaatgccaggctttagtagccaaagtgcagccctaagaagctggagccacttgcttttttcagtgcaggcacaataccaaaaacctggagccaacacaagctgcaggtaattaacatttattgttcccctttcagggaatgtcacacacgcaaatgatcaaaggtcagttcctgatcaacataagtaaataagcctgtttaagataaattcttccacactcccttgtacctactgcttgctctctgcctcagggttatagaacagctgccttcagctattctcccctggagctctgcaggaccttccaacatttcagaaaatttgcgttctttccctatcctttttccaccactctgaccaatctcccacatctcccctttttctgtttttttgcatcaggttttgttgattgaagcatacagatctgagcagcgacaggtttgactggtgcaatggttacagtttgtgttccagctttgcaccctagaaccagtaaataacataagacaaacatgagtataatcaatattattcttttccaatcaaggattgatatgtaatgttacttggcacctgagtccaatgtgtgccattactgagggaccccaccgggggtaagtcaatacctcccagccaattggtcacgttgtcagaggctgagaagggggtaccttcccaagtaaaatgccgtaagaaaggcagatctagaagatgggcccaatagtttatagcaggtgtgggttgcaggcaaaaagagagaataagaagaatcagtattctataagagttgcaatgtggaataaaaagcatagcaaagaacaaattatatggattgaatggtatctgtgtctgaagcagatttgttcagcctcctgagttgtgttcttcagcattccccaggtaatgtctggggcctgtgtcatccaaggaagccacatcatccagggttgtgggttctgcatcgtcatttcctttatttctggtagcaggttgggccctagtcatgccgtggtaaggtttgatgcatcatgctggaatccaaagaggacctaaggggctgtgaacacaagcatatcccctttcccacgttagcaaatcatttggaccacaccgtacattactatttacacctttccataaaactgaaggctttctattttgagaggtttttgcaaagtgcttatctatggctcattgaaatgtatcatctaaatttaagaaattaagagtaaataaggcttgtgctagtagtgttgtaaggtccctactcatattcacccttttttgattttaagcgtattcttaagggtggaatgggcacgtttcactatgacctaagttaaatgattgataaattcaacaaatggctcctggggcccttgtcatacatttagaaaagatcactgttgaactccacctttgagaatttggtcccaggccctgtgagtgcactgactctgtgcataggctgggggaaaaatttaattgttgttgtacatttacatagggacccctcccctggagtatagcagctgttatgttttgcctggccaattgattctggttagcttgttgttctcataactcatcatgttatgccctccagaggaggtattgactggcctctgaagttgttttagctagcactaaccagtcccatggggtcatgtggaagttatatgctatggcctcaattaatcctttcataaatgggctagtggctccattttctctaatgctctttcttatttctttataagtcttgaaagcaatgggttcatgtacatgattgccttgttgatcttccatcatcaggcaagccaagagctccccctctaatgctgcttgcctaagacagggtcccataactgtagtgtatcccttgtctttttctcaatttactgggggaggggctcagggaaaatctatgtctcctctgtggcaccttcactcggtaatggcggggctgagagaggaggagatagtaaggtaggtgatgattcttcctcccttcccattttatgctcttctgtgtagagtggggccaaagcagtcctaacttaaggcccataacattaaagaacattaaagatgctactgggactcattgtccttgtgcataatgtcatttaagatttcttcccacttgttcccagagctctaggtctagtgtgccttcttctaggaattattggttacagaaaataacagtttgcattagggcccttaattgagcctttgaaaccgaggcttcactagctttaagcagttgtttcaatacttttatatactgttgctgttgagctgattactgttgtctcatgatgaaaccctaggttgaaaaatcccccaaacttggaaatccccagcgggcatcaattacttactgtgcagtaacttcactttcgtttttgagggttccatcatgatgcatttcattgcttcttacatggggcaccacctgctgggtctgtcccacagatcctggcagacagttgaaatgagtactcagacacaggtatgcagtgtaagagcagctaggggattgcccagctctagtggccagagtgcaatccaaaaaactggagctgcttgcttttattccatgcaagcacaatgctgacaacctggaaccaacacaacctgcaggtaattaacatatattgttcccctttcagagaacgtcatgcagatgatcaaaggtcagttcctggtgaacacaagtaaatatgtaaagaagtctctttaagataaattccctcacactcccttgtatctaccccttctcctctgtctcaggattataaaacagctgccttcagctattctcccctggtgctctgcagtaccttctgacctttcagaaggtttgcatctttccctataatttttccaccactctgactgatcccccacactttatacaatatgcttgtgagtagcaatccactctaaggcatttgtgatggtatggacccatgatagtacatgtggctctaagcccaggaatgagtcaacatctctccaattggctgatccatataggaggtgcctcacctgcctatcacctacatttagaagtgagtcatcatttgtagctttagaaatgagccatttctggctgtatgtttgcacatcactgtcacaattccaactgtggactgcatctgcatatgagatttaggacctcaccagtgggctctgtctatgtagagattacaattgtaatgtgtggcaggatgttcttttaagaaacacaatcttgggctgggcatggtggctcacacctgtaatcccagcactttggggggctgaggcaggtggatcacctaaggggtggagtttgagaccagtgtggccaacatggtgagtgaaacccctaaaaaaattagctgggcttggtggcacgtgcctgtagtgccagctacttgggaggctgaggcaggagaatcacttgaactcaggaggcagaggttgcaatgagccaagattgtgccactgcactctaacctgggtgacagagtgagactctatctccaaaaaataaataaataataaataaaagaaacacaatatcatccgtgtttttgtcacttgatgacactctttgtgccacccaagggctttgtacaatatttgagagagtggcaattctctatgaactcagtgaaaagaaaagacaggatcgtgttcattttcctaacactagctaggagggagtgtaactttttttggggggtgggggaaggagtctcactctgtcacccaggctggaatgcagtggcgtgatatcggctcactgcaacctctgctgcccgggttcaagatattctcctgcctcagccttccaagtaactggtattacaggcacctgccaccatgcctggctaatttttgtatttttagtagagacgaggtttcaccatcttggtcagtctggtctcgaacttctacctcatgatccacccacctcagcctcccaaagtgctgggattacaggtgtgaaccactgcatccagctgagtgtaactcttttattgccttgttcaaggtgtgagaatcatcatagcaattgcgagctggggcaagatatatgtcacaattacactagtgagtagggagtgagcagaagggtcacatcacctgggggtggtctaaaggtatgtcacgatctcttctgagggcaagaaccagacaggagagtcataacacatcacctaggtgcttagccagggatgcattaaaatcaattcctataaggcagacttgggtgctctggctcatgctggcaatctcagcactttgggagaccaaggcaagtggatcacctgccagccaaggcaacatgttggaaccccacctccactaaaaatacaaaaattagcctgttgtggtgatgcatgcctttaatcccagctacttgggaggctaaggcaggagaaccacttgaatccaggaggcagaggttgaaatgagccgagatcacatcactgcactccaacctggatgacagtgtgagattctgtcaaaaaaagaaaggaagaaagaaagaaagagagaaaagatgggcataggccacaagtcacatcacctgggtgctgagcccagtgatatgttacaacgctgtctttgagcaacaccctgagaggtgagacacacacctggtggctgatcccactgacatgctacaatcttttcttcgtgcatcgtacatgtaggtgaggagagtcacatttcataggtggtggatgccaaaatatgtcacacggtacctgtgggcaggacccaggcaggagcctctcatcccctaatgtcagactctgtgatatataacaatatgcaaaatatgcaaggtccagtcaaaagatgagttacatcatctaggtgctgggcccaatgatacgttacatttcctactgtggacaggtccagaaagataaggagacacctatcacttaggccatccagagatatgtcacaatgaccacttgggcaggaaccaagaagaatcaaatcccctgtgtgctgggcccagcaataagtcactctcacttctgttagcatgacccaggcccaaagatatattataatctaaccatggacaaagtgaagataagagaggagagtcacataaaatagttgatggacagaaaactcgcatcatcaggggtagggcccagcaatatgtcacaatgtcttatgtgtgcaggtccaagaaaaaaaaaagtaatatccctttggtgcttagttcagtaatattgtaaatattgtacaatttttcccacaggaaaaactaaaaaataacagaaaaaaatcagctacatgctttgaaaggtcacaattctccctatgagcagagacctggtaacacaagagagtcatatcacctgtgggactggtgccagagatatcttttttttttttttttgagatggagtctcactctgtcacccaggctggagtgcagtggcacgatcttggctcactgtaacctctgtctcctgaattcaagtgattcttctggctcagcctccctagtagctgggactacaggtgcccatcaccatgcccggctgttttttgtatttttttttttttttttttttagtaaagacagggtttcaccatgttgactaggctgggctcaaactcctgaccttgtgatccatcagcctcggcctcccaaagttctgggattacaggcatgagccaccgtacccagccacaaaaaacattttaaaatgcctcctgtagccaaggcccaggcataaaatttacatcacctgagtgttaaactcagcaatatgtcacaatggcccaagtgggcaaattgcaggcagttgagtcacaaattgtcagtgcagggcccagcaatatgtcacaatgtcccctgacaccaaaacctaaaagaagagaagagtcacataagctagttgctgggtgtagcaatatgctacaatttccctgtaagcagggaccagcagaagagagtcacattacctggatgctgggccctgtgatatgtcaaccatctttcctgtaataaagacccaggaagcagaaacacatcatctggttgctggccacagcaatatgccacaactttccgtgtaggaagggtgcaggtaggagagtcacatctcctaggtgaggaatgcagagacatgtcacaatgcccctgtaggaagagcacaggtaggagactcccatcccttaggtgttaagtttagcaatatgtcacaatacccaaatatgcagagcctgaaaaaaagaggagaatcacatcacctagatgctaggccagtgatgtgtcacaatttctctgagcagagaccaggcaggagaaaagagtaacatcaccatggtgatgggcactgagttatgtcacaaggtcccctgtaggcagacccagaaaaaaaagttacatcacctaggtgttaaacccagaaaaatgtaacaatgtctaatgtgatatattgagccccaatatgacacaacatgtaagacacatttgagagagtcacataacttgggtgcaatgttggtagcaagccgtaagcctatcataaataggtcttaaagatactggccataaacaggatttctgcagcaatgtgacatgcttgtgatggctgtcatgcacactgctaaaagttgttggtttactggagcagggcaagggacacctggcccagcctggatggaaaaactgctcaaactgcaaatgatagcaggagcagcctgtgccttgagagcatgtttttgctgcagataatcagccagagcctgtttctctgctcctttctgagaatcctttgtttcccataaggaatgcttttagctaatctataatctataatctatagaagcaatgcttatcactggctttctatcaataaatgtgtgggtcaaactctgttcaaggctctcagctcagaaggctgtgagacccctgatttcccactccacaccctatattctgtgtatgtgtctttaattcctctagcactgctgggttagggtctccacgatcgagctggtcatggcaagcagtgcccaacgtggaggctcaaacccaggtcagtgtgtcaccagagcgacagttggagaacatagaactaagttggaggacacctgagtactctttttttttttttttagggttttcaaaataaaatttttctttttttttttttttacaggtgaattacatttatttatttgccatattgttcctgtttttatcatggtgaattagaagcacaattgtgaaatgatggtttaaggctttttccctcctggacttttcttttttttttttttttaattgatcattcttgggtgtttctcacagagggggatttggcagggtcataggacaatagtggagggaaggtcagcagataaacaagtgaacaaaggtctctggttttcctaggcagaggaccctgctgccttccgcagtgtttgtgtccctgggtacttgagattagggagtggtgatgactcttaacgagcatgctgccttcaagcatctgtttaacaaagcacatcctgcaccgcccttaatccatttaaccctgagtggacacaacacatgtttcagagagcacagggttgggggcaaggtcatagatcaacagcatcccaaggcagaagaatctctcctagcacagaacaaaatggagtctcccatgtccacttctttctacagagacaaagcaacaatctgatttctctatcttttccccacatttcccccttttctattccacaaaaccgccatcgtcatcatggcccgttctcaatgagctgttgggtacacctcccagatagggtggcggctgggcagaggggctcctcacttcccagaaggggcggccgggcggaggcgccccccacctccctcccgatggggcggctggccgggcgggggctgccccccacctccctcccggatggggcagctggccgggcgggggctgcccccccacctccctcccggacggggcggctgccgggcggagacgcttcctacttcccagatggggtggctgccaggcggagaggctcctcacttctcagaaggggcggctgccgggcagaggggctcctcacttctcagatggggcggctgccgggcgaaggagctcctcacttctcagacggggcggccgggcagagatgctcctcacctcccagacggggcggcggggcagaagcactccccacatctcatgatgggcggccgggcagagatgctcctcacttcctagacgggatggcggctgggaggaggcgctcctcacttcccagactgggcagccgggcagaggggctcctcacatcccagatgatgggtggccaggcagagacactcctcacttcccagacggggtggcagccgggcagaggctgcaatctcggcactttgggaggccaaggcaggcggctgggaggtggaggttgtagctagccgagatcactccactgcactccagcctgggcaacactgagcactgagtgaacgggactccatctgcaatcccagcacctcaggaggccgaggctggcagatcactctcggttaggagctggagaccagcccggccaacacagcgaaaccccgtcttcacgaaaaaaatacaaaaaccagtcaggcatggctgcgcgcacctgcaatcgcaggcactcggcaggctgaggcaggagaatcaggcagggaggttgcagtgagcagagatggcagcagtacagtccagcttcggctcggcatcagagggagaccttggaaagagagggagagggagaccgtggggagagggagagggagaccatggggagaggaagagggagagggagccacctgagtactcttaatcaatccccatggtgagtaagaaagggagctcagaagcatcagggtaacaatggacaagtgtgggctctggttcgttccaccttggaacattttcacaataatgatgaggaggaaggaaagtataacaaagtaacagaagaggtaacagagcaggtttgtttgccagctaaagctaaagcctcaaaggaggaagaggttcatccctagccttctgcaccccattattttgaagaaaaagagtggcctgaccctccagatctttcttttcccgaggacactgggcaaaaagtagttgccccagtgactgagcagcaccttgagtgaccgctctcagttctattcaggcaggaatccagcaagctagagagggtgatatggatgcttggcagttctctgttagaatatacccacctgatcaatagggaaatattatggctatgtgtgagccttttccttttaaaatacttaaagaatttaaacaaggtattaatcaatatggaccaggttctacttttgtaatgggactgttaaagagtgttgctgtctccagtcagatgttgccagcagggatggtaggattatttctaggtaggtctagtttaaatttaaaaggagtacaagtacatacaggaatcattgattcagattacaatggggaaattcaaaatgttatatctacttctgttccctggaaagcagagccaggagagtgtatagcacagcttctgattgtgtcatatgtggaaatgggggaaaatgaaactaaacagacaggaggatttggcagaaaaaataaacaagagaaagccacctactgggtaaatcaaattactgataagcatcctacctgtgaaataactattcagggaaagaaatttagaggtttggtagatacaggagtggacatttcaatcatttctctacagcactgaccatccgcacggccaactcaaccctctcaatttaacatagctggagttggtaaagcccctgaagcatatcaaagtaattatattttacattgtgaagaacctgatggacaatctgggactattcagccaattataactctctacctataaatttatgggggagagatttattacagcaatgaggagcagaagttctaattccagaacaattatatagccctcaaagttagcatatgatgcaagaaatggggtatgtacctggcatgggattaagaaaaatttacaagtgttaaagaaactgcttcaagtgggaggacaaaattctcatcagggtttaggatatcatttttgatggtggccattgttaagcctccagaacctataatttcaaaatggttaacaaataagtcaatttggatagaaaaatggccactgagtaaagagaaactggaggctttagagaatttagttaccgaacaattagaaaaaggatgcatagctccaacattttccacctggaattctccagtctttgttattaagaaaaaaatcaggtaaatggagaattaattcagttacacaacctataggaacattacagccaggattgccttctccagctatgattccaaaaaattgtcctttaatagtcatagatttaaaagactgtttctttactctccccttagctgagcaagactgtgaacggtttgcatttacaattcctgtggtaaaccatctgcagcctgctaagcgttttcattggaaagtcttaccacaaggcatgttaaacagtccaacaatttgtcagacttatgtaggacaagcaattgaacctacttgtaaaaaattttcacagtgttacgttattcattatacagacgatatgctttgtgctgccccactcaggaaatattattccaatattatcacttacaaaactcggtttcttgagctggtttaattatagctcctgacaaaattcagactactactccttactcctacttagggaccttagtaaatgacactacagcagtgccacagaaagtaaccatacataaggatcaattaaaaacattgaatgactttcaaaaattactagcagacattaattggatatgacctgctctaggcattcctacctatgccatgagtaatctattttctatccttagaggagatcctaatctcactagccctcggcaattaataaatgagactgagacagagttacagctgactaaaaagcaagtgcataaaactcaaataaatagaatagatccagaaaagactttagacttattgattcttccaactcagcattcacctactggtgttattgttcaagagcaagatcttgtagaatggctttttcttccacatactaattcacagactctatctccttatttggatcaaactgctactctgataggaaatgggaggactcaaatcattaaattgcatggatatgatcctggaaaaattatcgtccctcttacagaggcacaaatacaacaagtctttataaatagtcttaattggcaaaccatttagctgatttcataggtgttcttgatagtcactttccaaagacaaaattattttaatttttaaaattaatgaattagattctccctaaaataactaaatttaaaccaattgaaggtgctggaaatgtttttacagataagtctactaatggtaaagcttcttattctggatcaaaaagtaaagttttctagacaccctatacttcagctcaaaaagtggagcttgtagctgtaattgaggtgctgactgcttttgagatgcctgtcaatgtaatttctgattcttcatatgtggttcattccacacaattaattgaaaatgctcagttatgatttcatacagatgaacaactaatgactgtatttacccaattgcaaacagcagttaggaatagaatgcatcctttttacattactcatattagagctcatacacctcttccaggacctttgactgcagggaatcagatggctaattgcctagttgctactgcaatatctaatgctagacactttcacaatttaacccatgttaatgactctggtctcaaacacaggtacagtattacttggaaagaggataaagccattattcaacaatgtccaacttgccaaatggtgcattctacatcttttacaggagttaatctttgaagattggtacctaattctcttcggcaaatggatgtcactcatgttccttcttttggtaaattggcttatgtacatgtatgtgtagatacattttctcactttatttgggctacatgccaaataagggaatcttctgcctatgttaaatggcatctcctgcaatgcttcacagtcatgggcattccagcttcagttaaaatgcacaatgccccaagctagagcaaagctcaagctacatttttctctatatggaatattaaacacattactggtatctcatataattctcaaggacaagccatagtgaaaagaacgaatctctcattgaaacagctgttgcaaaagcaaaaagggggataaacagggactatgggacacctcatatatacaattgaatctaacattattaaccttaaattttttgagcctgcccaaaggccagatgttatcagcagatgaacagcatctacagaaaccagttgcaatgacagaagcagaacaactggtttggtggagagatctgataacaaaaagttggaaaataggtaaaataataacttggggtagagggtatgcttatgtttctccagcaaccgatttggataccatcaaaacacctgaaaccttaccatgagccagatgctgaggaagagattctgggaggatcccaaggaccccctggttgcagtcatgtcaagactgatgctgaggaggaccccaactatcatgagcaacacccatcaaatacagccacctacctggggacagatcaagaagctgtcacagatggtggaagaaaacctgaggaaagcaggcacggtgagtaatttaatgatagctatgatagcagtgatcaccattgccatgagtattccttcagcaagggctaacacagagaacagttatacttattgggcatatttatcaatcttggctggcaataatgcctggatgtaatcactctatgatgcatttacacgtgctttctggtctcagcatttaccataataaatctgctcctataactgaggcataccaccctcaaaaacctatttgtaaacagaattaaacctgaccagaagaaatgaacatacttgtttgggaagattgcattgcagaacaggcagaggtgatgcgcaacgattcctatggaatcattattgattagtcctctaaggggacgtttagcttgaattgcacctctcagtctgtgtgccatggccacactatgttcagctggtctgaacaaaatggtcagatggtagaaatggtaagaagtgcggcaagagttcctattatctggaaacatggcagtatagtggcacctcaacctcaaatgatatggctcactctgggagctaaacataaggatttgtggaaactattaacagctcttaataagatcaagatttgggaaggaaaatatactatgccatcagaatataatcctaattacattttagaactttttgaaaacaatacaatgtgaatacaaagttgtgttcaccctccttttctgttggtaatgggtgatctaaagtttgacatctctaattatcatgtaacttaccaggaatgtagattgttctcttgtgtgaactcttccttgtttagtactattcattctatcctagtagtgagagctcaagaaggagtatggttaccagtgaagctttcccatccttaggaagcctctctctctctccatattactgaaattcttcagaaaattctgagatgctctcagtgtttcattgttactttaatcttgattattataagactgatcactgtcacagctactgctgcagcagctggagttgcactacattcatcagtgcaaacagcagattttgtaaataaatggcaaaagaattctactctgctgtggaactctcaaactaaaatagaccaaaagatagttaatcaaatcaatgatctctgacatactgtaatgtggctaagagatcaaatagctagtttagaatatagaatgcagctaaaatgcgactggaataattctgacttttgtatcactcctcacccttgtaatgaatcagagcatgagtgggaaagaattaagaaacatttaaaaggtcatactggaaatttatctttgaatattgcaaaactgaaggaacaagtatttcaagcttctcaggcacatctgatgctaataccaggaactaaagtgcttgaaggagctgtggacaggttagcagctattagcccattaaaatggaatgggtgggaattgaacaatgggaacacatggacacaggaaggggaatatcacacactggcgccagttgtggggtggggggaggggggagagatagcattaggagacatacctaatgttaaatgatgagttaatgggtgcagcacaccaacatgccacatgtatacatatgtaactaacctgcatgttgtgcacatgtacactaaaacttaaagtataataataataaaaaagaaacttggaagttctgtgatttcaatgatgattgtgcttttaatctgtgttgtctttgtatagtctgtagatgtggatcccgaatcctgcaagaagtagccctccatgacaaagctgcctatgcctttattgctttgcagaaacataaagggggacttgttggttgcaagccctaagcctatcataaacaggccttaaagaaactggccataaacaggatttctgcagcaatgtgacatgctcatgatggctgtcatgcacactgctaaaagttgttggtttactggagcagggcaaggaacacctggccctgcccagagcaaaaaaccacccaaaccacaaatgatagcagagtggcctgtgctttgacagcatgtttttgctgcagataatcagccagagcctgtttctctgctgcttgctgagaatgctttgtttcccataaggaatgcttttagctaatcttgcttatcactggctttctgtcaataaatgtgcggttcaaactctgtttgagactcagctctgaaacctgggagacccctgatttcccattccacaccctctatttctgtgtgtgtgtctttaattcctctagtgctgggttagggtctccatgaccgagctggtctcaacaggtgcaggattcagcaacaattgacaatacccaaaatttgtggggtccccccaaaaagaggagagtcaaatcactgaggtgctggatacagtgatatatcacaatcttacctttggactgggcccagacagcaacatcaaaccactcaggtgctgaacataggcatatgtaacaatcatacccgcaggaaattccagtaatgaattaacaatcctgcacaggtcccagttctaggtatgagagtcaccacattttctatgttgggtctaagtatggtagtgaaaatctcaccaatgaattggattggtgcatgagagctttcattcctcctgtaaactgtgttcactctggccctaagcccagataaaattttcacagattcagatagaattcccacatgccaatgaactgggtttagaaataagtcatcattccaactttggctggatgttcacatatgacagttacaattttaactgtggactgtgtctgtgtgaaattcagggtctcaccagtggtctccatccatgtgtgagggtgacaatcctaacaattggtggggtgtacacatgagagccacaatttcacctgtgtgctgaaccctggaatgacactctctgtactacaagaaatttatatagtatgcaagaaagtgacaattctctatgactttatacaaaaaaaagaagacccaggatcataactacaacactaggcctagctataaaagacagcatctctcctactagatggtttgaggtacgagaatcaccattgcatctgtgagctaggccaaaatatattttacaatcccatctgtgaatagacagagagaaggagagtcacatcacctaggtttttggccaggaatacatcacaatctttactgagggcagggaccaaacaggagtatcacatcactttaatactcagccaggaatatgttgcaaccttctcctaaaagtaggacacaggcagcagagtcacatcacctgggtgctgagttcagcaacaggtaacaatgctttatatggtcaagacccatgcaggagagacacatcacctggcacctgggcctagtgataattcacaatttttcctgtgtgcagagtgcaggcaaaaatggagagtcacatctcataggtgactgatgcatagatatgtcagaagccccactgtagaaagggtccaggcagaagcctcttattttataggtgttggatctagtaatatgtcctaacatggaaaatattcagggcttaggcaaaaaaaaagggcggggtcacataacccgagtgcagaacttagcaaaatgtaacaatgcaccatgtgggcagtgccaagggaagaaaaaagactcacatcacctgggtggacggcccaggcatatgtcacaatgacacttgtgggcaacaccaaggctggaaaagagggtcacatctttgaggtgaagagtcaagatatatgtcacaagctcatctgtgggctgggccaaggcaggagagtcaaatcactaaaatgcatagcagacacaatcatacctgaaagtccaggaataagattagaaattccatacatgtccatgttctagatatgagagtcaacacctcctgtaatgttgggtctaaatacatgagtaacaatctcaatagctgacaaaatttttgcaagagagccacaatttcttctgcagactgtgttctctcagtgtaggcacagcctcatatgtgtgctgaagtttggtcagagtcaccagcccacctgtggaccagatccacatatgagagtcaattctccaactttcaacagactccatgtgtgagctccagaacctcaacagtgagatatgcttatgtgggagaatgacaatctttattgttgcctgagtgtgcattcaagagacactatctcacctgtgtgctgtgcactcctatgacactctgtgtcacctgagggctttatacaatatgcaagagtggtgatcctctgtgatcttcaaacaagaaggaaatccagattcttttcattggttctaagcccagagtcaacatccctctaattggctaagtccagataagagtcctcaccttcctatgagctgggtttagaaatgagtcaccatcagctgggcatgatgggtcatgcctgtaatcccagcaatttaggaggctgaggcagttggatcacctgaggtcacaagtttgagaacagcctgaccaacatggtgaaagctcatctctactaaaaatataaacaatgatctggacgtggtggcaggtgcctgtaatcccagctacttgggaggctgaggaaggagagtcgcttgaagccaggaggcagaggttgtagtgagctgagatcacaccattgcactccagcctgggcaacaagagggaaactccatctcaaaaaaaaaaaaagtcaccatctcaactgtggccagatgttcacatatgacagtcagagttccaactgtgaaatggattcatgtgagattcaggacctcaccagtgagctctgtccatgtgtgagggtgacaattctaaaggtgggtggggtgtgcataggagaaacacaatctcatctgcataccggaccctgttatgacattctctataacacactagggctttacagatgtgagagagtggtaattctctatgacttttatacagaaagaagacccaggatcatctttgttttcctaagcatagctatgagcaacatgatctctcctactggcttcttcgaggtatgaaagtcctcagtacatctgtgtgcttggccaagttatatgtcacaattccacctgtgggtaaagaacaagcactagagtcacatcaactgtgtgctgggccagggttatgtcacaatcttccctgagagcatgcaccagacaggagagtcatatcacagggttctcaaccagagatgttacaatcctctcctgaaagtagggcacaggaagaagagtaagatcacctggatggtgggccaggagatatgttacaaggatcgctgtgggcaaggcccagaaaggacagacaaaacacctggttgctgggcctgtcaatatgtcacagtcatctctatggcagaatgcaggcagaagtaaaggatttcatctcccaggtgatggttaaaaaaatacatcccaaagcactctgtgggaaggcctcaggcagaagccttccaactcctaggtgtttgtttcagtgatatgtcacaataaccaaaatatgcaggtctcaggcaagtgaggagggtcacaccacctaggtgctaggtcaagtgatctgttacaatcttttttttttttttttggcaatgctcaagcagaatagaaaagtcacatcaccaagataatgaacaaaaacatgtgttagaatatttctgtgtgagagcccatgcaggaaagtcacatcaccatgttgttggatccagagataacgttgtaatacatgatgcatgtgggtctcaggcaggagaggagagtaacatcacttaggtgcagggtgcacctaaattcacatcacaatttccccttaagcacaccccaagcagtagcagagagtcacatcacctaggttcttggtccagcagtatttcacaatacccctgaggggatggcctaggcaaacaagtcacattacctaggtgagaagcctagagatatgtcacaatgtcccttgtgggtaggtctcaaaaacaagagaagagacatagcctaggtgctgggctcagctttatgttccaatcaccccagttggaagaagccaagaatgaagaggagtcacatcacataggaattatgtcaagtggcatatcacaattcccactgtggacaaaccccagaagaaaggagtcacattatctaggtgggaggcccaaacatatgtcacagtgactcctgtgtgcagggaccaggcagaataatacaccactgttttacttgtcccagcaataagtccctctctattctgtggacatggccaaggcaggagaggaatgtcacctcacataggtaaaaagggcatctacctgagcttggtctataggagagattgtaatgggtcaagaaatatgtcacaatgctctctgtggtaagggttcaggcagaggactcacatcatcttagtactgggcccagtagtatgtcccaatgccttctaagggaacagccaaagcaaaaaaagtaatatcaccttactgttaggcacagtcgtatctcataatctcttttgtgagcagaaacttaaaaaaagaaaagtgtcagccgggcgcaatgggtcatgcctgtaatcccagcactttgagaggctgaggcaggtagatcacctgaggttgggagttcgagacaagcctgaccaacatggagaaaccatgtctactagaaatacaaaattatttgggcatggtggcacatgcctttaatcctagctactcgggaggctgaagtaggagaatcacttgaacctgggaggcagaggttgtagtgagctgagatcactccattgcactccagcctgagcaagaagagtgaaactccgtcaaaaagaagaagaaaaaaggaaagaaaagtgtcatatcagctaggtgctgggcccaacaatatgtcccaatacccccagtcattggggaacaggcaggaaaaataagtcacatttccagggtgattggaaagatgtatcttacaatgccctctgtagaaaggtccaggatgaagcattacctcacctggctgatggacttagcaatatgtcacaatggcctatgtaggtagggcacaagcatgagagtcacataatcaaagtgtgagacccagcaatatgtcacaataaacatgtgggcagcaccaaggccaaagaggagactcacatcacctgggtgcaaggttcagcaatatgtcacaatgacccctgtgggctttacaaggcagaatagagtctggttccagggatatatcactgcgagctgggcccagggaagagagtcaaaccattcagatgctgggctgaggtgtatgtcacaatcacacctgtaggaaggtcctgtgatgacattaacaataacacacatgtcccgagtgaagggatgagagtcaacacctcctccattttgggtctaaatacaggagtcagtctcaatggtggactgggtttgtgcatgagcctcaatttctcttgcaaactctgtgccttaaagttacagccacaaaggtgcactgaatcttggttaaagagtcaccaacccaactatggaaagaatccgagagtccattttccaacattcaactgcctccaaaagtaacattcagaacctcaaaagtgggttgtgttcatttaagtagatgacaatctttgctattaactgggtgtgaatatgactgtcgcaatctcacctgtgtgctcagccttgccagtacactctttttaccacctgggtgctttatatggtatgcaggagagttgcaatctgctctgagacctttgtacttctgtggattcttaatcttatgtggtcctaagtctaactatgagagtcaacatctctcatattgccagggtccagacaggagagtcctcacttgccaatgagctgggtttagaaatgagccagcatctcacctgggcatggtggcttacacctgtaatcccaacagtttgggaggctgaggcaggcggatcacctgaggtcgtgagttcaagaccaacctgaccaacatggagaaatactaaaaatacaaaaaaaaaaattatccaggtgtggtggcactgcccgtaatcccacctacttgggaggctgagacaggagaattgcttgaatgcgggaggcggaggttgcagtgagcagagatcacaccattgcactccagcctggacaacaagagggaaactccatgttaaaaaaaaaaaaaaaaaaaaagggtcagcatctcaactggccagatgttcagatatgatagttacaatttcaactgtggactggatctgcatgtgagaatcatgacctcatcagtgggctctgtctatgtatgagggtgacaattctaaaaataggcagaatgtgcttacaagaaacataatatttaggccaggcatggtggctcatgcctgtaatcccaacactttgtgaggccaaggtggacagatcatgaagtcaggagatcaagaccaacctggctaacatggtgaaaccacatctctactgaaaatataaaatattagccatgcatggtggcacgtgcttgtagttccagctactcaggaggctgagccaggagaattgcttgaacccgtgaggtggaggttgcagtgagctgagatttcaccactgcactccagcttgggtgacacagcgagactctgtctcaaaaaaagaaaaaaacatgatccaacctgctttgcagccctaaccaggactgaggcaggagcctcccattttaggagtctggctcagtaaaatgtcacagtaccaaatatgcagttctcaggcggaacagaagagtcacatgacctaagttcttgttccagtgatatgtcccaatcttgccttttggcagggaccagggagaagagagcagtcacatcacataggtgatgaatgaacatatatgtcctaatacccccatgtacagagaaaatgcaggacagttgcatcagctatttgctgaacccagtgatatgtcaaaatatgcaatttatgcagggcccaggcaggagaagagagtatcatcacctaggtgtcaggcacagtgacacattacaatatcttcttgagagtctaagcagtggagaagagcgacatcacctaggtgccgagtcaaaaaatatgtcagtcaggcatagtggctcatgcctgtaatcccagcactttgggaggtggaggcaggtagataacctgaggtcaggagttagagatcagcctggccaacatggtaaaaccctatctctaactaaaactatgtgggggttcagtcaggatggtgggagaaattgtaaaattataggaaataaagacaaacccttgtggaaggcctggggatttgcataaactgtttggctgaaggcagctgaattctcctaaaagttcagggcatagatacataggaatgtagactagtttacctaaataacttattcacaaatgtggttctaaaactaacctttgatagctcgtgggcaggatggctcttttagaggggaaggcgaccaggttgattaccctctattagtgttgactcaaagcgtttgtcatttaatgtgtgctgaataaatgccagcagggccagtgagtcagggccatggctgcaactctttacagccctctccttggagtctgtaagtggcccggaccctcagccgatctgagaagcacaatatctgtgtcagtgtacattattcatctgtcattgtgtcagggtctgcaggacaaacccctgcagctggtgccccatgtgaggaatgctgtgcagggagcacgacggacccccaaacaatggtaaaaaaggaactgcacagtcagtgagtaatcggtaagtcattggtgcccacatgagatttccaagtttggcggggattgttcaggctgaggtttcatcatgggacaacagttaccagctcagcggaaatagtatataaaagcattgaaatagctgcttaaagctagtggagcctcagttttgaaggctcaattaagggacctaatgcaaactgttgcaacccataacccacggttcccaaaagaaggcatgctggacatagagctctgggaacaagtggggagaaatcttaagcaacaccatgtgcaagggtaacgcatcccagtatcatctttaatattatgggctctagtgagggtggccttggtcccattatacacagaagagcctaaaaaggggaaaaaggaggaatcatcacctgccttaccacctccttctccctcagccccaaaataacaaagaagaaacagaggttttacctaagcctcctcctcaaataaataggaaaaaagatgagggatacactacagcaatgcaaccctgtcttaagcaagtagcattagaacgggagctattagcctgcccagtaatgtaaaatcaatgaggaaaccagttacataaagagttgagagaccaggcacggtggctcacccctgtaatcccagcattttgggaggctaaggcaggcagaacatgaggtcaagggatcgagaccatcctggccgacatgatgaaaccctgtctctactaaaaatacaaaaattagctgggagtggtggcacacgcctgtaatcccagccactcaggaggctgaggcaggagaatcacttgaaaacccgggaggcagaagttgctgtgaaccaagtttgcaccattgcacttcgacctggcccagcctggtgacagagcaagactctgtctcaaaaaaaaaaaaaaaaaaagagttgagaaaaggcattagaggccacagctgtgcagccaagcaggcagcgggcagaagaaaaggtttggcagcagggaagctcacagacatggtgccagcaaatgctcccaaaaacagcctgtgtggtgtcgaggatggggagccaggcccagcatgccagacctagcctgctaaggaggggtggaaggcgtgcacgggaaggtctgccaagccagcagcagcctggtggtgggggaagggagcagcacaagcgaaaagtggcacaggcaaaaagtggcgcctaggcaagtgcaacatgacagccaccccaggacccgcgctgctgccctccaactccacgggcagcccacagcaaaatttcatgtgttccttgtatacaagctatcaggcctctgagcccaagcctgcaagtacacatccagatggcctgaagcaactaaagaaccacaaaagaagtgaaaataattcctgccttaactgatgacattccaccattgtgatttattcctgccccaccctaactggtcaattgaccttgtgaaattccttctcctggacaatgagtctcacaacctccccactaagcaccttgtaacccccatctctgcctgcaagagaaaaactccccttgactgtaattttccactacttgccctaatcctataaaactgccccactcctatctccctttgctgactcctttttcggactcagtctgcctgcacccatgtgattaaaaagctttattgctcacacaaagcctgtttggttatctcttcacacagacatgcgtgacatttggtgctgaagacccgggatgggggactccttcgggagactggtcccctgtcctcaccctcactccatgaggagatccacctacaacctcgggtcctcagtccaaccagcctaaggaacatctcaccaatttcaaatcaggtaagcggtcttttcactttcttctccagcctctcttactacccttcaatctccttgtccttccaattccagttctttttcatctctagtagagacaaaggagacacattttatccatgaacccaaaactctggcaccagtcatggactcaggaagacagtcttcccttagtgtctgatcatcatggggatgcctgccctgattattcacccacattccattggtgtctgatcatcgtagggatgcctgtcctgatcacccacattccattggtgtctgatcaccgcagggatgcctgccttggtcattcacccacattcccttgctggcaagacaattgtggggatgcctgctttggctgctcacccatgttacagcccagggctgctcaccccacacccttctccacatctctacccttctcttcaaacttcactatgggttaccttccaccctccattcccccttcttctcccttagcctgtgttctcaagaacttaaaaccttttcaactcacacctgacctaaaacctaaatgccttattttcttctgcaacactgcctggccccaatacaaacttgacaatggttccaaatggccagaaaatggcacttttgatttctccatcttacaagacctggatgacttttgtcaaaaatgggcaaatggtctgaggttctagacatccaggcattcttttacacatcggtccctccctagtctctgctcccaatgtgactcatcccaaatctttcttctttctctcctgtctgttccttcagtctccaccccaagttctgagtcctttaaatcttccttttctaaggacccatctgacctctcttctcctccccaggctgctgctcaccaggatgagccaggtcccagttcttcctcagcctctgttccccgaccctataatccttctatgacctccccttctcacacttggtccagcttacaactttgttccacaactagctctcccccacctgcccaaaaatttcctcttaaagaggtggctggagctaaaggcatagtcaaggttaatgctcctttttctttatccgacctctcccaaatcagttagcatttaggctcttttacatcaaatataaaaacccagcccagttcatggcccgtttggcaacaactcttagatgctttactgccctagacccagagaggccagaaggccgtcttattctcaatatgcattttattacccaatccactcctgacattaaaaaaagccccaaaaattagattccagctgtaaaaccccacaacaggacttaattaacctcaccttcaaggtgtacagtaatagagaagaggcagccaagcggcaatgtatttctgagttgcaattacttgcctctgctgtgagagaaaccccagctacatctccagcacacaagaacttcaaaactcctaaactgcaggggccaggtgttcctccaggacctcctccccaggatcttgcttcaattgccagaaatccggccactgggccagggaatgcccgcagtccaggattcctcctaagccgtgtcccatctgtgcaggaccccactggaagttggactgtccaactcacctggcagccactcctagagcccctagaattctagcccaaagctctctgactgactccttcccagatcttggcttagtggctgaagactgatgctgcccaattacctcggaagcctcctggaccatcacagatactttgagtaatctcttatagtggaaggtaagtccatccccttcttaatcaatatggaggctacccactccacattcaagagtctgtttcctttgcctccgtaactgttgtgggtattgatggccaggcttctaaacctctttaaactccccaaatcttgtaccaacttggacattcttttatacactcttttttagttatccccacctgcccagctcccttattaggttgagacattttaactaaattttctgcttccatgactattcctgggctacagccacacctcattgccccccttttccccagttcaaagccttctttgcattctccccttgtgtctccctaccttaatccacaagtatgggatacctgtactccctcctttgtgatcgatcatgcaccccttaccatcccattaaaacctaattacccttaccccactcaatgccagtatcccatcccacaataggctttaaggggactaaagcctgttatcactcgcctgttagagcatggccttttaaagcctacaaactctccttacaactctcctatcctacctttccaaaaaccagacaagtcttacagtctcgtccaggatccgcatcttatcaaccaaattttcttgcctatccaccccatggtgccaaacccatatactctcctatcctcatttcctccctccacaacccattattctgttctgtatctcaaagatgctttctttactattccttcacacccttcatcccagcctctttttgctttctcttggactgacccttacactcatcagtctcagcaactcacctggactgttcgccccaagggttcaaggagagcccacactactttggccaggccctttctcattatctgctttctgtttgctcatctgccttccaccttattcaatattttcatgatcttctttgtagcccctcttaccaatcttcccagcaggacactatcctgcttcttcaacatctctactcaaagggatacagagtatccccctccaagacacaaatttcttcccctagcattacctatctcagtataatcttccattgacatacacgtgccttcccgtagaccaggttcagttaatctcccagaccccaatccccaccaccacacaactcctttccttcttaagcattgttggttatttctgactctagataccaggttttgctatcctaaccaaaccactttacaaactcacaaagggtaacttaactgatcccacagaccataagtcttttccccattcttcttttcactctctcaaaaaggccctggaggcagctcctacactagcactccccgacttatcccatcctttttccttacacacagctgaaatacaaggctgtgctgctggagtcctcacacaggagccaggcccatgacctgttgcctttctatcaaaacaacttgacctcacaattctggggtagccctcatgtctatgtgcagaagctgccactgctttaatacttttaggcaccctcaaaatcacaagctatgctccacttactctctacagttcccatagctttcaaaatctatttccccctttcctgttccccacccagaccacacttggtttactgatggtagttcttccaggtccaattgccaatcaccggcaaaggcaggttatgctatagtgtcttccacatctatcattgaggctacagccctgcccccttccactacctctcaacaagcagaactcattgccttaacttaagccctcattcttgcaaagggactagctgtcaatatctatactgattccaagtatgccttccacatcctttaccaccatgctgttatatgggcagaaagaagtttcctcactacacaggggtcctccatcattaacacctccttaataaaaactcttcttaaagctgctctacttccaaggaagctagggtagttcactgcaagggccatcaaaaggcatcagatcccattgctcagggcaacgcttatgctgataaggtagctaaagaagcagttagcattccaactttggtccctcatggtcagtttttctcgttctcatcttttcactttacatttccagttatgccttacaaaggtcccttcttcctctgtggctcctccacctacatgtgtctacctattaattggacaggcacatgtacactagtttcctttactcccaaaaatcatttcacaaataggactgaacagcttcctgttcccctcatgacaccaacacttcaccactattttgttttatttttcttattagtataagaagacagaaataggccttgaattactgctgaaaaaggaggactctaaatttttaaatgaagggtgttgttttgacctaaatcaatctggcctggtataggacagcataaaaaaatcacaaggattgagccccaaaactcaccaaccaagcaaataattacactgaaccccttgggcactctctatttggatatcctgggtcctccccaattcttagtcctttaatacctgtttttctccttctcttatttggaccttgtgtcttctgtttagtttctcaactcatacaaaactacatcaaggccatcaccaatcattctatatgacaaatgctccttctaacaaccccacaatataaccccttgccccaaaatctttcttcagtttgacctctcccactctaggttcccacgccacccctaataccacttgaagcagccctgagaaacatcacccattatctctccataccatcccccaaaattttcaccaccccaacacttcaccactattttgtttgttttccttattaatataagaagacaggaatgtcaggattctgagcccaaccctgcacatacgtatacatccagatggcctgaagcaactaaaaaaccacaaaagaagtaaaaatagccaattcctgccttaactgatgacatcccaccattgtaatttgttcctgccccaccctaactggtcaattgaccttgtgaaattccttctcctggacaatgagtctcagaacctccccacagagcaccttgtaacccctgccctgcctgcaagagaaaaaccccctttgactgtaattttccactacctacccaaagcctataaaattgccccacccctatctccctttgctgactcctttttcagactcagtctgcctgcctccaggtgattaaaaagctttattgctcacacaaagcctgtttggtcatctcttcacacggacatgcatgacacaactgatatcccagattataattctgtgctaagatttaagtaaaatttaagaatttaaaagacctctttctaataatggccactgtttttatctctctcttacccctaatgtgactctctccatttccaatttaagtaaagcagtagcctctgaaggtagagaaattacaaatggctcatgaattacttgaaaagcaagtaaaagctgggcatgtagaaccatctaatagtccttagaattcacccatttttgtcatccccaaaaagtcaggtaaatggaggcttttacatgacctacatgctattaatgccaacttgcaacctatgggaccccttcagcaggggttcccttccccatggcagttcctcaagattggcctataatcattattgacttaaaagactgtttttatatgattcccctagcagaacaggacaaagaaaaatttgtgtttacaataccagctatcaataatgaaaggccagcttgtcaattttattggaaagtgcctcctcaaggaatgctaaacagtcctaccatgtgccagtatcctgtaaataaagctttgctccccagtataaaagaatttcctgattgcaagattattcatttgatggatgatatattactaacagtcccaatggagctgctacttttaaatttatttacctctatcataaagaatacagttaagaggtttactcatagcacctgaaaaagtacaaatgtcctctccttggaaacatcttgggtacatactaacttccaagtcagtaagacctcaaaaagttaaactaaatactagcaacttacatacagtaaatgattatcagaacttactggtcaatattaactgactctaccccactttggggattcctactgataagttacaaaacctgttttctatcttaacgggcaatacagccctagattatcccagaaatttaacccctgcagcaaacaggggaaattgaggaaatagaacaatccatctctcagaggcagctagattgcatatatccaggctactcaattcagtaaaacactcccctagagggttaataggagagataaccccagaactgtgcttcctagatagtttttttgctcatatactgggactaaaacactctttccctatatccaattactcagtaaagtcatctattcaggccacaaacgatgcagtcagttgctagattatgatcctgatatcatcaggattcctttaagtaaaaggcaattcaaagcagtattgccagtatctatcgatctgcaaatagctctctctgattacccaggacatatagagcatgtccttcctgctaataaactccttcatttcttatcttgtactcctgtgattttgcctacaaaaatagttcacttccccatacctaatgctttaacactgtttactgacggttcaggtaaacatggaaaagtggcagtgtggtggagaccataaaattcactcactcaatctgggtttactttcactcagagagctgatattggggccctgatattggccttggaaactttttccactcagctcatcaatattgtgagtgactctgcttactctgtttacttattgcagaatcttgagacaaccttaattaagtccactctaaagtctgccctgtgtgctctttttctctgacttcagcaattgctagatcaatgtacacatcctatttttatgggcacacattcgatcccacagctcactgccttgcccattaacttatggcaattatcaagcagaccttcctgttataacatcactgcttaaccaagccagcaaatcacatcaattcttccaccaaaattagaaaaacttatctaaacaatttcaacttacccagaggctggctaaacaaattatcctgcaatgctcagcttgccagcttacaggcatgtcccctccttcaacaggtctaattagtgcacacgcccttcccggaaagtccactcaatatgtcattaaacatcttttaacttttgtgtttatggggtggcccacaacaattaaaactgataatggtccagcttatgccagctcacaatttcaacagttttgccacacgtggaatatccaacatttcacaggcatcccatataatccccaaggacaagccatagtagaatgtgcccattccactcttaaaaatatgctcaaaaaacaaaaaagagggagtatgggtaaagaccctggaacactattggcacaagccttattgacccttaattttctaaatttagatgataaatttcaatcagctgtagaaaagcactttgctaaaacctctcaagacataaaacctgcagtttttgttaacgtggggaagaggatatgcttgtgttcataccccctcaggtcctctttggattccagcacgatgcatcaaaccataccatggcatgcctaggacccaaccccatatcagaaatgaagaaactgaccttacagtacccgcagccctgaacaaagcagcttccacagatgacacaagccccggacctgggggatgctgaagaggacaactcaggaggctgaacgaatcctgctctggacactgacaccaattactccaggaaattttttccttgctatgctttctgtgtatattgcaactcacatagggtattgatcctttttgtactcttgctttgctggccacctgtacctgctacactctattaggctcatacttgaacccacctttcttttgccctgtcacctggggagacatccccttcccagcctttaataatgtaactgctggccgggcgcggtggctcacgcctgtaatcccagcactttgggaggccgaggcgggcggatcacgaggtcaggagatcgagaccatcctggctaacacggtgaaaccccgtctctactaaaaatacaaaaaattagccgggcgtggtagcgggcgcctgtagtcccagctactcgggaggctgaggcaggcgaatggcgtgaacccgggaggcggagcttgcagtgagccgagatcgcgccactgcactccagcctgggcgacagagcgagactccgtctcaaaaaaaaaaaaaaaataaataaaataatgtaactgcttggctaagagggatagatttactcctagtagggctccatagtaacagcacacatagaactgaagtgtcaaataacactacaggtcactctttgactggaaaaaaatgttgctaattatactcatgattgtcttatgttatttgctaattctaggatgcaaagttggaataagagcaatgaccacctctcctgagagacctgtttgttcccacatctgtactcttcagtcaacagaacctgatgcaaagaacagaaaaggggaagatgtgggggattcagtcaggatggtgggagaaattgtaaaattataggaaataatcacaaacacttgtggaaggcctgggggtttgcataaaatgttgggctgaaggcagctgaattctcttaaaagcttagggcatagatacacagaaatgtagtttatctaaatgacttgtttacttatgtggtcctaaaactaacctttgatagtttatgggcaggatagctctctcagggtagggggagggcaaccagattgattacccactgatggtgttgactcaaagccttcgtcatttaatatgtgctgaataaatgccagcagggccagtgagtcagggccacagctgcaactctttacagcactctcctttgagtctgtaagtggcctagaccctcagccggtctgacaagcataatatctgtgttagtgtacattattcatccatcgttgggtcagggtctgcaggacagacccctagaaaaataaaataaaattaaaaatagccgggtgtggttacacacacctgtaatcccacctacctgggaggctgagatagaatcgcttgaacacaggaggcagaatttgcagtgagccgagatcatgccactgcactccagcctgcgcaatagattgagactctatctctatatatatatatgtgtgtgtgtgtgtacgtgtgtcacaggagagtcacgtaacctagaagctgggtaaacctatatgacataatcatccttgtggacagggtacaagaagaaagtcacatcacataaatccttcaccaagagtcacaccatttaggtgatgggaccagagatgtgtcacaatagtccatgtaagcagagatcatgcagaaggaagaaatcacctgtgtgttgggtgtagcaataagtcactctattttctgtgggcatggcccagacagaaggggagagtcacatcatctaggtgcttggcccagagatacgtcacaatctctactatgggcaaagccaaggtaagaaaggagagccacatcaaattgttgataggccaagaaatatgccacaatgccccaagtaggcagggtctgagcaggagacaaatgacattcatgttgggcactgcaatatgtcacaatgtcttttgagggcaggccaggcaaaataaccttggtgttgggcccagcaatacgtcagttttcttgcagaagagaagaatcacatcagctcagtgctgaaaccagcaatacatatcgttatcccccagtgagcagggatcagtccagtgaaaagattcacatcacctatgtgatccacacagaaatgcatcacaatttccctagaaggcagtgccctggaagaacggttacatcacgtgggtattgaaagcagctatacttcacaatggtctatgtaggcaggccataggtggcaaagacccatcacctgggtgctgagtccaaggatatgtcagaattttcctgagagaaaggctcaggtgggagagaaacaccttctaattgctgggcccagtgatatgtcacaatcttctctgtgggaagaatgcagataaaagaggagagtcacacctttctaggtaatgaagacagagacatgccatcaagcctcctgtgggcaaggcacaggcagaagcctctcatcccctaggtgttgggcccagagatatatcacaatactcacaatatgccatgccctggcaatagaggtaagtcacattacctaggtgctgggtccagagatatgtcacaatccctattttgtcaaggcccaggcataaatggagagtcacatcacctgagtgaaaaatgaaaagatatgtcatcatacccttgtgggctaagcccatgcgggagggtcacttcacgtaggtgctggccccagtgatgtgtcacaatacataatgtatgcagggccaaggcaacagaagagtaacattacctaggatactagcccagtgatatatcaaaatctttttctgtcagtagagagtcacataacctaggttcttagtccagcaatatggcatagtaccccttgaggggagggcctaggcaggagagtcacatcacttaggttagcagccaagagacatgtcacaatgtccactgtgggaagggttcaagaaaagaggagagtaacataacctagcggctaggctatgtgtgataatcacctcaggtgatccacccgcttcggcctcccacaatcctgggattacaggcatgagccttctgccttgttttagatggagcctcactttgtcacccaggctggagtgcagtggcatggtctcagctcactgcaaactctgcctcccagattcaagcaattctcctgcctcagcctcccgagtagctgggactacaggcacgtgccaccatgcccagctaattttttgtatttttagtggagacagggtttcactgttttagccaggatgctctcaatctccagacctcatggtccgcccaccttggcctcccaaagtgttgggattataggcgtgagccaccttgccaggcctgcccttcttttaagaagaaactgtggctggtcacagtggcttatgcctgtaatcccagcactttgaaaggctgaggcgggcagatcacctgaggtcaggagttcgagaccagcctggccaacatggtgaaaccccatctctactaaaaatacaaaaaattagctgggtgtgatggtgcaggcctgtaatctcagctactttggaagctgtgacaggagaatcacttgaacccaggaagcggaggtagcagtgagctgagatcacgcaactgcactccagcctgggcaacaagagcaaaactccatctccccccacccccaaaaaacagaaaagaaaaagaaaaagaaaagaaagaaggacagaggcagtagagtcacgtcacgtgggtgccgggctcagtgatatgtcacaatgctccctgtgagcaaagcccaggcaggagaaacacatcacctgatttctgggctgaaaaatatgtcacaatctcttctttatataagcaaagccttggcatagcaagagagtcacaacaaatagttgattttcccaaaggtatttcacaatgctctgttgtcagggttctgacaggagaccctcatcaccttgttattgggcccagaaatatgtcacaatgccttttgaggtctaggccaaggcagaacagtaatttcacattggtgctgagccccacagtatgtcccaatctcttatccaagcaaaacttatgatgaaaagaagagtcaccctgttggtagtgggccaagtgatatgtcacaatccctagtttttggagaaaccaggcagaagacagtcacatcacctgggtgatggatggaaagatatgtcactatgccccttgatggcagaacccaggcagtagagttaaattaccagggtgtttgacccagcagtgttttacaattgcttatgtggcaaggcacagcaaggtgtcacaatgtcccttgcaagcagcactaacacagaatagagtcatataccctcagttctgggttcagcaaaatgtcactatcccatctgtgggctggaccatgcaagagtcagatcactcagctgatgaacagagaaaaatgtcacaattaaacctgcaggaggttcagggatgaaattaacaatcccacacatgtcccggtattaggtataggaggttaacacttcctatatattgtgtctaagaacaggagttacaatggcaatggttgactgaatttgtgcatgagagcctcaactcctcctgcagactgtctaattagtgaagtcacagcctcataggtgtgctgaatcttgctctgagtgtcaccaactcaccagtgaactggatccacatctgagagtcaagtttccggcctttgactgcctataggtgtgagattcagaacctcaaaagtgcgctgtgttcatgtgggaaaatgacaatgtatactgtgtgtgggtgtgcatacaactgtcacaattttccctgtgagctgggccctgttagtacactctctatactacccaaaggctttatacagtgtcaatgagaatcacaattcagtctgagatcttcatctttgtttccccaagggagaatcttttccccccccaccaagatggagtcttgctctgttgcccaggctggtgtgcagtggcacgatctcagctcactgcaacctctgcctcctgggttgaagcaattttcctgcctcagcttcccgagtagatgggattacaggcatccaccaccatgcccagctaatttttgtatttttagtagagatggggtttcaccatgttggccaggatgtcttgaactcctgacctcatgatctgcccgccttggcctctcaaagtgctggggttaagtcgtgagccaccgtgtctggccagatcttcatctttgtatgcaaccacaaccatacctatggccctatgcccagatattagagtcaacatctctccaattggctgggtccagatagtagagtcctcactgcttatgttctgggtttagaactgtgtcatcattcaaacagtggttggatgctcacatatgacagtcacaattccaactatgggctgtgtttgcatgggaaattcaagacctcagcaatgggctctttctctgtgtgagggtgataatcctaatggctggtgaggtgtgcatataagaaacaaaatctcaccaatgtgctgtgccctgtgataacactctctctaacacttgaaggcattatattataggtggggttgtggcaatcctgtatgacctgcatacaaagagaggacccaggatgttgctcatttttctaagtcgagctatgaaagacagtatcttttctaatagctgatttgattaatgaaagccatcatcacatttgtaagctgacaacagtgtatgtcataattaggtagggacctagcaggagagtcacatcacctggatttcagccaaggatatctcacaatcttccctgagggaggcagccaagcaggagtgtcacatcacctgggtgctcagctagggatatgttacaattctctcctgaaagcacagcacaggcaacagactcatgtcacctgggtgctgagctcagcactatgtcacaatgctcgctggggtcaagacaaagacagaagagccacatcacctggtgtctggttccagggatatgtcacaatccttcctgtgaaggggattataaaatgtcatatcttctaggtcatggatgcagatatatgtcacaaggtccctgtgggcagagcccaggcaggaacatactatcctataggtgttgggcctaatgatattttaaaataaccaaaatatgggaggcccaggcaaaacaggagagtcacatcacttacatgctgggtccagtgatacgccacaatacccctttttggcagggcctaggcagaagaccattacattgcctagttgatgaatgaaaagatatgttatgtccgggcacggtagctcaagcctgtaatcccagcactttgggaggccgaggcaggtggatcacaaggtcaagagatcaagaccatcttggccaacatggtgaaaccccgtctctactaaaaatacaaaaatcagctgggcatggtggcaggcacctgtagtcccagctactggggaggctaaggcaggagaatcgcttgaacctgggaggtgaaggttgcagtgagccgagattgcaccactgcactccagcctggcaacagagcgagactccgtctcaaaaaagtaaaaaggaaagatacgttataatacctctgggctcaaaaatatgtcaaaatgccttatgtaggtagggctctggaaaaaaaaaaaaatcacatgacctaagggctggggtcagctacaagtaacaaactccctagttggcaggacccatgcatgagagaagagtcacatcacttaggtgctgggctcagcgacatgtaacaaagctttttggcagggcccaggcagaagaggagtgtcacatcacctaggtgattaataaaatgatagctcataatacccctatgggcagggcccacgcaggagagttgcattatctaggaggtggagtcagtgatatgtgtcaacacacaatgtgtgcaggtcccaggctggagaggagtcacctcatctaggttattgacccagtgatacatcacaattattttttgggcagagaccaaacaatagagaagagtcacatcacctagatgctgggcccagctatgtatcacaacaccctgagaagagggcccaaacaaaagatttgcatcacctaactgagggtctcagacatatgacacaattcccgctgtgggtagggctcaggaagaactgtagagtcacataaccttggagctgggcccaactatatgtcaaaatcatctcagtgagtggggaccaggaataagaggagagtcaaatcatgaaggtgaagggccaagcaatgtcacactccccagtgtggacaggtcccaggaggaagagccacataatgtcagtgatgggcccagatatatgtcacaatgaattccgtgagccagaagaagaatcacatcacccgtgtgctaaactcagtaataagtcactctctcctctgtgggcaaggcacaggcaggagaggagagtcacataacctctgttctgggcccaaagttatgtcacaatctctttttgggcaacatccaggtagagagaagagtcacataaaatagtaaatggcccagagatgtatcttgtaggtaccttgcaggaagggtcaggaaggagactcacatcacattgcttctgggcccagcaatacatcaccatgccttctgagggcagtggcaaggctaaagagtaacgttactttagtattagacccagtgacatgtcacagtatcccctgcaggcagaacctaagacaaggaggagagttatgtcagctaggtgccaagcccagtgatatgtcacaatcccttctgtgagcaggagccacgtaggagaacagagtcatattacctgtgtgatgggtgcagggatgtcacaatgtcctctgtaggcaggacctaggcagtatggttacctcacctgggtgtgtgacagagcaatatgtcacaatgacccacatgggaagagcacaagcagaagagtcacataacctgagtgtggggcccagcgatatgacacaatgccccctgtggaagagacaaggcaggagagaagattcacaccacctgggtacaaactcagtgatatgtcacaatgtcctctgtgggcagtgccaaggcagtagaattgtcacaccacctctctgggtccagggatatgtcacaatcccatttgtggcctgggcccagggaggagcatcaaatcactctggtgctgggtaaagtgatatgtcataatcacaccagcaggaatgtttagggatgagattatgcatctggactggaaagaatcaacacatcaaaaatattaccagactgtgcaagatggctcatgcctgtaatcccagcactttggaggccaaggtgaggggatatctggaggccaggatttggagactatcttgggggcaatgtggtggacgagacctctattgaacaataataataaaagtttaaaaaagaagctgggtgtggtggctcacgcctctaatcccagctactcaggaggctgaggcaggagaatcgcttgaacctgggaggtggaagttgcagtgagctgagaatgcacaattgcactccagcctgggggacaagagtgaaactccttccccccaaaaatgaatgaatgaataaataaataaataaatccgaggtcaactgggtgcagtggctcatgcctgtaatcccaaaactttgggaagatgaagcagacagatcacaagggcaggagttcgagaccagcctggtcaatatggtgaaaccccatctctactaaaaatacaaaaattagccaggcgtggtggcgggtgcctatagtcccagctactcaggaggttgaggcaggagaatcgcttgaacctgggaggtagaggttgcagtgagccgagatcatgccactgcattccagcctgggaaacagagtgatactccatctcaaaaaatatatatattaatattaataattctgaggtcctagagaaaaacagtcttgagtcaaaaatacaaaagacctatttagcagttagaatagtttgtatatatttcaactaggcaggaaaagaatttacatacaaaagttttgtacagaaaatgatttaagaaaagaaaagagaaaaatctctgcccttattttcaagaagggtgaagcctgtatttgtaatttgtatctttttttacaacatccaggtctagggccataatcttgaactcatggacatctgaattctagtaggtgctagattcaggaacctgagggctggccttgggcacattctgcacatcaaaaagtgtttgtggggaagtaaaagacagaagagggaaagatgctatcaataactcattaataggggacagtgcatggtaactgggaggactcttatgctacagatactaaccaaggcagggctatattctgacatattcctgtgtccatgcaggcagatgagattacgattggtggctcacaagcccaggttgatgaagagatcaggttgtgctgcagtttcacggtctggaatagagattagccaggagtcctctatgaacttgtataattttttggtgagaaattctaggggcaaaggcactatacacataattcctgagagtcaaagtacacttatggtatgtgtacacttatggtacacaaagtacacttatggtatgtgaaatacacttatggggttgggcacggtggctcacgcctataatcctagcactttgggaggccaaggcaggtggatcacctggggtcaggagttagagaccagactggccaaaatggtgaaacactgtctctactaaaaatacaaaaaattagctggaggtagtgacacatgcctgtagtcccagctactcatgaggctgaggtaggagaactacttgaacccaggaggcagaggttgtagtgagcgaagatcatgccattgctctccagcctgggtgacaagagcaagactccgtctcaaaaaaaaaaaaaaaaaaaaagaaagaaaaagaaatacactacttatggatttcctgaaggtcaaaatacacttatggtatagtgttgtatgttggagagaggaagatggcctcatttccaaaatttgagaatgtaggaacaaaagtggaaatttacaattttactgcaagcctgagttaggctaggggaaaacggtggtggcttagaggccctgcttgtcatacattagaaagaccagtcttcctgtggagagttaaaataattaaaccactctccctctccctctctctctccctctccctctccctctttcttctgtctccctctgttgccgaggctggactgtactgctgtggtctcgggtcactgcagcctccctgccccgggctcccgtggttctcctgcctcggcctgctgagtgcctgggactgcgggtgcacgccgccacacctgactgatttttgtatttttggaggagacggggtttcgccatgttgacctggctggtctccagctcctgacctctagtggtctgcccacctcggcctcctggggtgctgggattgcagacggagttctcgctcactcagtgctcagtgttgcccaggctggagtgcagtggcatgatctcggctcgccacaacctccaccttccagccgcctgccttggcctcccaaagtgctaagattacagcctctgcccagccgccaccccgtctgggaagtgaggtgcacctctgcccagctgccccatcagggaagtgaggagcacctctgcccggccgccccatctgggaagtgaggagcccctctgcccggccgccccatctgggaagtgaggagcgcctctgccaggccaccccatctgggaagtgtacccaacagctctgaagagacagcgaccatcgagaatggcccatgatgatgatggcagttttgtcaaaaagaaaagaaggaaatgtggggaaaagaaagagaggtcagattgttactatgtctgtgtagaaagaagttgacataggagacatcattttgttctgtactaagaaaaattctgccttgggatgctgtgaatctataaccttaaccccaaccccgtgctctctgaaacatgtgctgtgtcaacccagggttaaatggattaagggcagtgcttaaacagatgcttgaaggcagcatgctcattaagagtcatcaccactccctaatctcaagtacccagggacacaaacactgctgaaggccacagggacctctgcctaggaaaaccagagacccctgttcacgtgtttatctgctgaccttctctccactattatcctatgaccctgccacatccctctctgagaaacacccaagaatgatcaataaatactaaaataaataaataaataaataaaaataattaaacagcgggaaattagactgaagtggctctagtgccctgtgttcataagtaaaacatctaaaacctaactaatgcatttcttataaattactctcttagggagaaaaaaactcaggcctaagtgattataaacctgcaattaacctctggttacaaaaccaggaaatttacacctggatcatacaaataaggtaactacataactgtaatccattcttgaatctggtttgccttctcaagcactttataaaaccctttttttttatccccctcaggtggaccacaaatcagggccgggtgctttccatttcaccaatcacggtttgttcaaataaacccgttaatgttttaacattgactccctttagttttaacagaagagaccatgcacctggtggctcaggcctgtaatcccagcactttgggaggccgaggtgggcaggtcacttgaggccagtagtttcagacaagcctggtcaacatcgcaaaaccccgtctctactaaaaatacaaaaattaaccaggcgaagtgcaaaggtaatcccaactattcgagaggctgaggcatgagaattgcttgagcctgggaggaggttacagtaaaccaagatcgcaccactaaagtttactctgggagacagagtgagcctctgtctctccatcttaacaaaaaaaaaataacaagagagaatgaagaccccatgggccacagctcctcccatgcacacaccaagtcaggattctgccctgatgacccccctggcatccctgaacactctgggaaatactcggggctgcaggtgcagagctgcccagagagctccatgtagggcgccccccaggcaccaggtgcgatgccagggtcctggctgcaggcccacctgccatcttgcagccagagggcctggggaggagccgagccagtggggactcaggacggcaacatgggagcagactctggggaggccggtcccgtgatttcacagcctggtctcccctctctggatgcccaaccctgcatactcaccatttcccagcttccaggatgtcctggcatcttagctatgcgtctcccaggacctgcatcacagggcaacagaggctgtgacagagtcactgggggctcccaaggaggaggacgcaaaaccggaagaggacgcagaacagtggaaatgaattccaagctctggagggagggagaaaaaggcccaccaaatgctagaagccacgccctcctctctgagagcctgattgggcagttcccatgccagcaccactgattggataaagctccaggacccacatcccacctccaccctccccagcattactgcattttatggactgggaaacaggttcaagtatgcagggtcacatgcccagagtactgcaactaattaagaagagagctgagacttgaaatgcacttgcttttttccttacctgggttggcttgtataatgcaccttattggctaattaagggtaagaagaggaatatttagacaacttttttaaaaagttttttttttttttttggccaggttcagtggctcatgcctgtaatcccagcactttgggaggctgaggcaagctgatcatgaagtcaggagttcaagaccagcctggccaaaatggtgaaactccatctccactaaaaatacaaaaatcagctgggcctggtggctggcacctgtaatcccagctactcaggaggctgaggcaggacaattgcttgaatccaggagtcagaggttgcagtgagctgagatcgcgccattgcactccagcctgggctgtgaatccagcaggaccagccacccaacagtcagctcccagtcgtgacctgagtccctggtggtgcagctctgctccaggcccctctggctgcaagatggtgactgggcctgcagctgggacccttgcatccttccccatccctgcacggccccctatctggaactctctgggcagtgttaggtacagtgagttcctcttcaaagagtcaacttgttcagcttccttgttctttgatctcaattttcaaagcctaacttcctcattctttgcagctccttgcccctagttatggtaaacaaccttcccaccagtcctaatctataactcacatctgttcccttgattacccgctctgtaactgaccttctgtccaaactgctcttactgccactgtaacccacacctctgccccatttgaaatagccaatcaggattagcttagattgtgcattccagccccaatgacacagcaacggggactaactgttttagggataaaagccccttcccttccttgttcgatatgctcttgcaattgtgactggcacaagctgcaaccttctgcagaactaaattgccttgctgagaaagctttttgccagagtgctgattctcctttgtgggactgagcatttgtttctaacagcagctctgcacctgcagattgttcccagagtcttcccagagtgttcagagatgctagacaggtcatcagggcagaaactcaactcagtgtatgtgtgggaggagctgcagccctggggtccccagtctctctggtgtcgagaccagcttggccggggagaccctaacccagtggcactagaggaattaaagacacacacacagaaatatagaggtgtaaagtgggaaatcaggggtctcacagccttcagagctgatgtgggcagcaagtcacccaggtgccaaggcaagagaccgaggacacaagctgttccagtataataaagtataaaacaagaatagttataccagatatacatcttagatatgattatatatgaatatcattgatcattagtttgtagcaattactctttattccaatattataataatccttgctctataatcataacctaggaaaaaccaggccgtacagagataggagctgaggggacatagtgaggagtgaccagaagacaagagtgcgagccttctgttatgcccggacagggccaccagaggactccttggtctagtagtaatgtcagcgtctgggaagacgcccattgccgagcggaccgtggtctagcggtagcctcagtgtcaaggaaaaacaccggctacttagcagactgggaaagggagtctccctttccccgggggagtttagagaagactctactcctccacctcttgtggagggcctaacattagtcaggctcacctgtggttatcctgaggcctaaccatctccctgtgatgctgtgcttcagtggtcatgctcctagtccaccttcgtgttccatcctgtacacctggctctgccttctagatagcagtagtaaattagtgaaagtattaaaagtctctgatatgcagaaatagtggcataagctgtctttctctctgtctctgctccctctctgcctcagctgccaggcagggaagggccccctgtccagtggacatgtgacccacatgaccttacctatcattggagatgactcacactctttaccctgccccttttgctttgtatccattaaataacagcacagccagacattcggagccactaccggtctctgtgacttggtggtagtggtcccccaagcccagctctcttttcttttatctctttgtcttgtgtctttatttctacactctctcacctccacacatggggagagacccaccgaccctgtggggctgctcccttcagctgagagcctcgaacagagatttacccacatatttattaatagcaaacgagtcattagcattgtttctgtagatattagattaactaaaagtatcccttataggaaacaaagggatgggctgaaataaggggatgggtttggctagttgtctgcagcagtagcatgtccttaaggcacagatcactcatgctatcatttgtggtttaagaatgcctttaagtggttttctgccctggatggcccaggtgttccttgccctcattccagtaaacccacaaccttccagcatgggcatcatggccattttgaacatgtcacagtgctgcaaagattttgcttatggccagtttatggccagattttgggggggggcctgttcccaacatgtcccctttctttgatttgcaaagcgataaaagcaagggcagctttgtcacggtgagctacttctcacaggagtcaggatccacatctgcggactatacaatgacaaacaacacagattaaaagtacaatcatcattgaaatcacagagtttccaagtgtttttatccattttaatgggttactagctgctaatctgtctgcagctcctttaagcactccagttcttggcagtaaggtcaggtgtgcctgggatgctttaaatatttgttcttttatccaaaaacaagtttgtagagtgtctttctagatgcttttttattctttcccaaattttgatcttattaagccacaaatccttatgtttagctcctacaatgggccatatcttttgaggttgaggtgccactataccaccattgttccagataataggaactcttgccatactttttatcatttctaccatctgaccattttgttcagaccatatgaacatagtgtggccatggcacgcagactgagaagtgcaattcaagccaaacatccccttaggggaccaatgattccataggaatcattgtgcagcacctctgcctgttctgcaatgcaatcttcctaaacaagtacattcatattttctggccaggtcaattttgttacaaataggtttttgagggcagtatgcctcaatgtagcagcagatttattatggtaaatactgagatcagaaagcatgtgtaactgtgccatagagtgattacatccaggcatcatttccagctaagattgataaatatgcctaataagtataattgttctctgtgtcagcctttgttgaaggaatactcatggcagtggtgatcattgctatcatagctgccattaaattactcatggtgactggttgtcccactttcctcaggttttctttcaccatctgtgacagcttcttgatctgtccccaagtgggtggctgtgttcaatgggtgttgctcatgacagttggggtccttctcagtgtcagtcttgacatggctgcaaccagggggtccttgggatcctcccagagtctcttccttggcatctggctcatgataaggtttcaggtgtcttgatggtatccaaatcggctattgcttttggcctggagaaacataagcataaccgctaccccaagttattattttacctatttcccaactttttgttatcagatctctccaccaaaccagttgttctgcttctgtctttgcagctggtttctgtagatgctgttcagctgctgataacatctggcctttggtcaggctcaaaaaatttaaagttaataatgctagattcaattgtgtaggggctgtcccataatccctatttcgcccccttttttgcttttgttatcagttgttcatctgtatgaaatcgtaactgagcattttcaattaactgtgtggaatgaaccacatatgaagaatcggaaatcacattaataggcatatcaaaagcagtcaatacctcaattacagctacaagctttgctttttatagggagtctggaaaactttacttttcaagccagaataagaagctttaccattactagacccatctgtaaaacaatgaaaacacttagcaggctgcaggttgtttaccacaggaattgtaaatgcaaaccgttcacagtcttgctaggctaaagggatagtaaagaaacagtcttttaaatctatgactattaaaggacaattttttggaattatagcaggagaaggcaatccttgctgtaatgctcccataggttgtataactgaattgatagctcttaagtcagttaacattctccatttacctgattttttcttagttatgaaaactggagaattccaaggggaaaatgttggagccatttcctaattgttcagtaactaatttctctaaagcttccagtttctctttacttagccaccattgttctatccaaattggcttatctgttaaccattttaaaggtataggttctggaggcttgacaatggccgccatcaaaaatgatatcctaatctttggtgagaactttgcttttctccttgaagtggctctttcaaaccttgcaaatttttttctagtcccataccagggacatactccatttcatgcatcatacattgactttgagggctatataattgttctggaattagaacttgtgctccccattgttgtaataaatctctcccacataaatttataggtacagaaattacaattggttgaatagtcccaacttgtccatcgggcccttcacaatgcaaaatataactactttgatatacttcaggggctttaccaactccaactatgttaaattgagcaggttgaattggccacacagatggccagtgctgtagagaaatgattgaaatgtccgctcctgtatctaccaaacctttaattttctttccctgaatagttatttatttcacaggtaggacgtttatcagtaattgatttacccaataaactgctttgccttgtatatttgtgcttccaaatccacctgtttgtttaatttcactttttcccattcccatatacggcacaatcaggagctgtgctatgcactctcctggctctgctttccagggaacagaagtagatataacaatttgaatttccccattgtaatctgaattaatgactcctgtatgtatttctacccctttttaaacttaaactagaccttcctaaaagtaatcctattgtccccgctggcaagtgtccacagactcctgttgggaccttttgcaggggttccccaggcagaaggctcacagcttttgtgcagcataaatctactgtggcattaccagctgtggcgggggacagacattgtacaggggtgagtacagcctgagctggaaatgccccagtttagaacggggcccaggatgggcccctcatggtgttgcccaaaattgggttccctcctctatcaaacttagaatgacactgattagcccaatattttccttttttacattttggaaatatttcaggctcagcagttttcttttttcccctatctggcggcctgactcgctgattatttctacattcttttttagtatgaatagcttgtttaaattctttgagtaatttaaaaggaaaggactcaaatgtagctataatattttcctgttgatctggagggtgtattctaacagggagctgccaagcctctaaatcaccctctcatctagcttgctgaattcctgcctgaatagaactaagagcagtcactcggggcgccgctcgaacagtcactggggcaactactttttgcccagtgtcctccagaaaagaaagatctggagggtctttttcttcaaaataataatgagggggtgcagaagggtaggaatgaacctctccctcctttgccgctttagctttagctggcaaataaacctgctctgtaacctcttctgttaattcgttatactctccttcctcctcatcatcagtgtgaaaaagttccaaggtggaacaaaccagaccccacacttgtcccatttttaccctgatgcttctgagctcccctttttactcaccacggggattgctttaagagtactcgggtgtcctccagcttagttccatgttttccaaccatcgctccggcaaccctttgacctgcattggagcccccatgatggatgccacttgccaggaccagctcggtcagggagaccctaacccagcggtggtagaggaattaaagacacacagaaatatagaggtgtaaagtgggaaatcaggggtctcccagccttcagagctgagagcatcgaacagagatttacccacgtatttatgagcagcaagccagtcattagcattctttctatggatattagattaactaaaagtatcccttacgggaaacgaagggatgggccaaaataaagggatgggtttggctagttatctgcagtgggagcatgtccttaaggcacagatcgctcgtgctattgtttgtggtttaaggatgcctctaagtggttttctgccctaggtggcctaggtgttccttgccctcattctggtaaacccacaaccttccagtgtgggcatcatggccatcatgaacacatcacagtgctgcagagattttgtgtatggccagttttggggccagcttatggccagattttggggggcctgttcccaacactgctattaaatttttttgttaagatggagtttagctctgtctcccaggctaaagtgtaatggtataatatcgctttactctaaactttgcctctgaggctcaagcgattcttgtgcctctgcctccagagtagctgagattacagatgtgcaccaccacaccaagctaatttttgcatttttagtaaagatggggttttgccctgttggccaagctggtctcaaactccttgacctcaggtgatctgcccgcctcggactcccaaagtgctgtgattacaggagtgagccgccacgtatggtctctcctactaaaagttaaagaacatcagtgtttaaacattaatgagttcattggagcaaacagtgattggtgaaatgaaaagcgcccaaccgtggtttgtggctcatgtgaggggcatgaaggaaaggttttataaagtgcttgagaaggcaaaccagattcaagaattggttacagttatgcagtcaccttacttgcatgttccaggtagaaatgtcctccttatataattagaggttaattgcaggtttatgataggccaagcctgaatttttttcatcctaagatagtaatttgtaagaaatgcattcaagttaggtttcagatattttacttatgagcacagggcactagagccacttcagtctaatttcctgctgtttatttatttattttgagatggagtctcactctgttgcccaggctggagtgcaatggcatgatcttggctcactgtaacatttgcctcccagattcaagtgattctcctgcctcagcctcttgagtagctgggattacaggtgcacaccaccacgctcagctaatttttgtatttttagtagagatgaggttgcaccatgttggccaggctggtctcaaactcctgacctggtgatccaccctcctcagcctcccaaagtactgggattacaggtgtgagccactgcacccagccatagttagcttttcatgtctgttatttttagtgggtgatttcaaataaataattctttcactttgctttgggaatgctactagggaaaagaaatagagaaaatttttcttccactgtgactatagaaagtgaatacatttccacaagcaaatgtgaaagattaattgatgaatttcatatatttgtcaaaacatcagatcctcttttttataggatctagaatttgtaacagtggatatctctattttgtactctgctctctgaatgtccaagtttaatgctaaattttatgagatgaatcttggcaccttctagaaatgtttatatatgattgtctattaaattatttagtatgaataataaggaagcacaaaaagggtcagaaaaaaaggtgggaggggaagggagggaaaaaacatggtaaaatcagatcctaggtgagagaatatttcacccagaactcagcctattcttaagagggtcataaaaagggcttgtatgttagcttagagtaagattgagtctaagttaggaggcctgaggaaggaaaaaaacttaagcaaagtttggttaacaatttattattcaattatttatgaggcaaaaaaaaaaaaagaatttagagagtctgtggctttgtgatatcaaaaacaggaagggtgttctgtgcagtaagatgaccttggaaaacacaaaagatgggggattactttaatcacagctgttacctacccaccccatttttccccttcactttttttgccctgtacatttcttccatttggctgttgctgacaacaacaatcgttgtctttttttttttttttggcagtgggagggggatggttacggagtgtttctttgtcacccaggctggtgttcagtggcttgatctcggctcactgcaactttcgcctcccggattcaagtgattctcctgcctcagtctcctgagtagctgggattacaggtgcacaccaccatgcctggctaatttttgtatttttagtagagatggggtttcaccatgttggtcaggctggtcttgaactcctgacctcgtgattcacccgcctcgccccccccaaagtgctgggattacaggtataagccactgtgcctggcctctgtttttaattatatttctctcacattgttcagaattactagacctgatattaacacataatgtgttcacaaggcttcactctgtatggacctttttctcttgggcttccagtcacaacccacagtcatgcagcaaagttcacactgccctcaaagtctgcaggctgaatgttcttcctgcctatttgggatctaacattcttttttgtttgttttttttttttttttgagacggcgtgttgctctgtcacccaggttggagtgcagtggcgtgatctcagcttactgcaagctttgcctcccgggttcatgccattctcctgcctcagcctcccaagtagctggcactacaggtgcacgccaccactcccggctaattttttttgtatttttagtagagacggggtttcatcgtgttagccaggatggtctcgatctcctgaccttgtgatccatctgcctcggctgggattacaggcgtgagccaccacgcccggccgggatctaacattcttaatagtgcagtttgaccagatttctacaaaaacaaacatggcattaatcagctattctcactgtgtcttttcattcccccagcatcttcagactttaaattgattcaaatagcatgtggcctgaaaacccagctaggttcacacatttgcattgagtaggcctgagaatctaaatatttcactcattctcttgcctgaatacccataaatgtgccaagtgtccctgtggcttcctttcctgcccctccaaacctaaatctgcagttccaaattttgtccagcttctagggttctccagtatgtgttagagcagccttcatgttggaatttctcctccagtttttctctccttactgtaatgcctagaatacagagccaagttaattgtacctagaatctacatataagggctgatatccacctggaattcacaagacagggccagacttaacattttgggcagtgagccactgtggttgtgtgaggggctcctggtgtaaggtaaatttggtggcagaatctataggtgtacagaagcaacttagcagaggcaaggcagggccacagctgtccagagagataaagataactacatctcctgtatgtgaattgtgttactggagaagggtattcttgtccttgaacccaacagttagctcaacatatataggtaatatcagatctggatcgagaattaggggttgttctattttttattctggctccacagagtcagcctgagtctcctctgtttgaataactgttgaagcatcagcccagggccactgcagaccctctcactagcacctaggagtccttgagacatttagggatgtactgtgcagacaagggtcaggctgacaagtccaatcttcctcccatctcataaaagaatgagtaatccagggcttctttctcccatcacagaaggtatctccttatttggtgtccaaataggagttgctcctatttcctgatatttgggtggagaacaagtaggaggtctggaggcccaaactgataggttaacaaattgtttccattttatttggccatgagaagaacaggtgaagcagtcatggaccctaccatcaaggaatttttattctagagccaatggataaattatttaatttagagtaatgcgatcagaacagagaagggagttgtatagagaacttgggcttcatttgggacactaattgtatgttgtggttgtgagttctgatgtcaccacctgaagggccacccatggacagaaaagttgtggcaattattatttctatttcttttcacttgacaagaataaatagttttctatgtaattttctttattattattatttttttttttatttgagatgaagtctcactctgttgcccaggctggagtgcagtggtatgatctcaaccacctgctacctctgcctcctgggttcaagcaattctcctgcctcaacctcctaagtagctgggactacaggtgcccacctccatgcccagctaatttttgcatttttattagagacagggtttcactgtattggccaggctggtctcgaactcctgacctcgtgattcacctgccttggcctcctaaagtgctgggattacaggcatgagccaccatgcccagcttcaatgtaattttttagaaagacctacatgatttggtaaaattggttgctattgtatcatgcaaaatagataggatgaggcttaaatcgtttaaatcagaaaagttctgggagtcaagttcttattggtcaggcttagaatggagaactgaaaataagccagcagcatagagatgagaagctgagggccagctccctgccccagccctacccagctctaccctcttctgagccttgtccaggtctggcctcaccctgatatctccctcacagaactgattagaggagatcggatttatgtgtggcaactcttggtatctcttcagagctggatctcacgattttcctagacccaaaaacgaataaatgggagcaaaggattatttatttggagccttaatttctttctttcttattgaaaccagtgcttctagagacatttcatacagcaacctgttttacacttctgcaaatccaatagtttttctacatgttatgagaaagaaaatataaacacaacaattaaaagtcttttggacctctacttaagccttcatttctgtatcccttttatcttctgtatttaggtttcatagtgataagaaaacaaacagggctgggtgccgtggttcacgcctgtaatgtcaaaactttgggaggccgaggtgggcggatcacctgaggtcaggagttcaagaccatcctggctaacatggagaaacccagtctctgtttaaaatacaaaattagccaggcatggtggcacatccctgtaatcccagctactcgggaggctgaaggaggagaatcacttgaacctgggaggaggaggtcgcagtgagctgagattgcaccattgcaccaacaagagtgaaactccatctcaaaaaaaagaaaacaaacagcctgaaccatcgtctaaatcctgctagaaattatgggacacttaatacctacttcacagaattttttgaggtttaactcacaccaggtgagtttcccagcacaacacaccacagcatacttgtgagcacatagtatgagctcaataaacattgcattaacacatgtgtacatgtttcaaaatgcattctccagccttctgtagacttcaaatagctggcaaaaaatgtgatcttttgggatggtgattagtggttttcactgtaaacaaaaaatattcatgtttcaataagaatattgtatgtaagggactttgtgtgttattcctgctttctctgagagctggagagcaatatcagcattaacagggaattttttttttttttgagacggaatctcgctctgtcgcccaggttggagtgcagtggcatgattttggctcactgcaaactccacctcccaggttcaagcaattctcctgtctcagccttccgagtagctgggactaaaggtacctgccaccatgcccagctaatttttgtatttttagtagagacggaggttcaccttgttggtcaggctggtctcaaactcctgacctcagatgatccacctgcctcggcctcccaaagagctgggaatataggcgtaagccaccacatgcggcctatggggaactttttttaaacaagccaattcctggaccccttcaaaacgtgcaggatcacattagttagagaagggcccagaataccaaatgacctatatgcacattgaagcttgagagggaatggtcagctaagtggttctcagcccaggcatccagttaagaccacatgaccagtttgaagaaataccatcacctgcgtcttcccttacaggttgtattttctcctgagtagattcagatgattatgtacttttctctccatcaatatcacagcagtaataaagggcccacctaagtgccttcttagtgcaatagacagcgtatcagtctcataatgggcccatctgtgcattggcccctaaatctggtttgtctcattacagctgatgctaaatttattcatctggctaaggtgttttctgccaaattccttcactataaagttagttatttttttctttatcaataatgagtatcttggaagggggatttactgaggtgtataaattatcaaatttaatttaaaaactcctatttcttttttttcttatatcttactttggagaataaatactttcctatttgtcaactatagatagcagcttttgaaactggaagttctgaaacaggtctcagttgtttaggtttccatttaatttcaccttcatttcacaagcatatactttattctctgtaattttagggacaaagaaaaaatatataatcaatatatctattgtcttaaaattctaaaacatactatggcacataaaataaacaaagcaaaacattaaaaaaaaatctgactcagtggatcacctgaggtcaggagtccgagaccagcctggccaatatggtgaaacctcgtctctactaataatacaaaaattagccctgcatggtggcgcacacctgtaatcccagctactcaggaggctgaggcaggagaattgcttgaacccaggaggcagaggttgcagtgaaccaagatcgtgccattgcactccagcctgggggacaagagtgaaactccatctccaaaaaataaaaaataaaaataaaaataaaataaaaaatatacaactaataatagctcttattttactttatattattgcatgttttgatcttcaattacaagcacaaaacacaaaaatagatctacaaagaatgttataattgttaaacaatttaaaacatttaattttatttatacagaactgttctactctctcacttttcatgtgtatatagtcaccatttctatgatgtgtgcataaaatgtaaacatcatttgatcaattttgtgttgctgcctttttttttttttttgagatggtgtctcgctctgtcatctaggctggagtgcaatggcgtgatctcagctcactgcaacctccgtctcctgagttcaagctattctcctgtctcagcctcccgagcagctgggactacaggcacccaccaccatgcccaactaattttttgtgtttttagtagcgatggggtttcaccgtgttagccaggatggtctcaatctcctgacctcgtgatttgcctgccgtggcctcccaaagtgttgggattacaggcatgagccactgcacctggcctgctgctttattgtttttattaatcttctcaattataaaaactgctctggccagtcgtggtggcttgcacctgtaatcccagcacttcgagaggctgaggtgggtggatcatttgaggtcaggagtttgagaccagactggccaacatggtgaaaccccatctctactaaaaatacaaaaattagctgggcatggtggcacacgcctgcagtcccagctactctactcaggaggctgaggcaggagaatggtgtgaacccaggaggcagagattgcagtgagcccagattgcatcactgcactccagcctgggggacagagcgagactccgtctcaaaaaaataaaataaaataaattaaaaaaattaaataaaaagtaactggtctgggccaggcacagcgcctcacgcctgtaatcctagcactttgggaggctgagatgggtagactgcctgaactcaggagttcgagaccagcctgggcaacatggtgaaaccttgtctctactaaaatacaaaaaaaccccaaaagcctggtgtgatgtcgggtgcctgtgatcccagctacttgggaggctgaggcaggagaattgctggaacccaggaggcagaggttgcagtgagccaagatcatgtcactgcactccagcctaggcaacactgtgagactctgcctcaaaaaaaaaagaaaagaaaagaaaagaaaagaaacaaacaaacaaacaaacaaaaaactgcttttcttgtatccaagaagttttgggtccttgtgtgttgaatttgatttatatcagggtgctttttttttttttgagatggggtctcgctctatcacccaggctgcagtgcagtggtgcaatttcgactcactgtaacctctgcctctcaggttgaagcgattctcttgcctcagcctcccaagtagctaggactacaggcgcatgccaccatgcccggctgattttttgtatttttactagagacagggtctcactgtgttagccaggatggtctcgatctcctgatctcgtgatccacccacctcagcctcttgaagtgctggattacaggcgtgagccattgtgcctggcccagggtgctttcttattttccctctaatttcttctttgactgtcatttgttgtttaggagcatgttgtttagtagccacatgttttgagttttctaattctcttcttgctatttttttctagttttatgccattgtgatcagaataaaaacaacataattttcaccttcttaaatttgaaaaagcctgtttatttctggtttaatgtataatttctcctgaaagatattttatgtattttttatttttattttcattttgttatttttttctttgctctgtcttgccctgttgcccaggctggagtgcatgggtgcagtcttgactcactgtgacctcctgaaattataatttctcaaagtataattactcctgaaaaatattttatgtaattttttgtttttatttttattttgttatttttgttgttgttgttctctcttgctctgtcgcccaggctggagtgcatgggtgcagtcttgactcactgtgacctcctgaaattataatttctcaaagtataattactcctgaaaaatattttatgtaattttttgtttttatttttactttgttatttttgttgttgttgttctctcttgctctgtcgcccaggctggagtgcatgggtgcattcttgactcactatgacctccatctccccagatcaagcagtttttctgcctcatcctcccacgtagctgaaactactggtgcgcaccaccaagcccacccaatgtctgtattttccatgatgatgaggtttcaccatgttggccaggctgggagaatatttcatgtatttttgagatgaatgtgtattctcatactgttgaatgaaatgttatgtgcatatcatctatttagtctatagtggtatacaactacactgttttcttagtagatttctgtttgaatgatctgtctgttgttttgagtaaggtattaaagttttattgtatttctgtctacttctccctacagttttgtgaatatttgctttatatatttagaagctccagtgctgggagcatacatatttttaattactatatcctcttgacaaattaacttctttattattgcatggtaaactcatttgactcttgtgatagatgttgctaggaagtcttttttgtctaatttagcaataactaccattgcacacttttgattatcattttcatggaatatcttttttcatcctttcacttttggcctatgcttgtccttaaatcaaaagggagtctcttttaggcagcatatcaatgggcttttaaaaagtgagttggtcactctttttcattgtgttgtttgttgctatatcagtgtatcacagactaagtattttatgaaaagcaaaaatttatttgcctcatgattctggaggctgagatggcaaagaatatgacactggcatctgttgaaggccttgttctgcataataacatagccaaaggcatgaggaagagacagcttccttttataagagaacctcttgatataattaacccatctcatgataagaacatttatccatttatgagggttagattgcttatggcctaatcaattcttaaaggtcccaccttttaattctattacaatggctatttaattttaacctaaaatgtggagatgacattgtgtatagtagcagtgtctgtttattggataatttattttctttatatgtaaaatagtgataggttactattaataagttactattgtgattttgttttttctgtttatttaaattttaaaaaatattttattcttgtcctgtctttcctatggttttgttagtttgtgtcaagacagggttatgctttgttgcccaagctagaacacagtggtatatcagtgtgagtcacagccctctgtagcctcaacttcctgggctcaagcagtcctcccatctcagccacctaggtggctgagactacaggcatgctccacaacagccagctatttttttcatagagaaatgtctcattatgttgctcaggctggtatcaaactcctgagctcaagtaattctcccatctcagtctctcaaagtgctgggattttaatagtctagtttaggatgataacaatttaacttctgtgtatgtaaaaactgtacacattttcttcttttacacacttaatactatatagtcatactttataactttttatgttgtgtattcattaaaaaattattgtcactgtatttttaatactttttgtatagatcttattttagagtttaaagtatttttacaaaaccattacaatattctgaatttcactatatacttatcatttccagtgacatttatactttaatgtttttcatattgttagttctgattccatcattttaatgtgaagaattccctgtatcatttcttgtaagacaggttgagtggtgataaatttcctcacctttttcctttgtcttgaaatgtcttgatctgttttatggctaaaggacagctttattggatatagtcttttcagttgtcaggtttttcttttcttctttcagcattttaaatatataattgaatcttctggtttgcaatatttttgctgaaaaatccactgattacataaagtttctcttgtatgtaaagaatctcttatctcttcctgttttcaagatttgtgctttatctgtgaatgttgacaatttaatgatattgtgttctagggtaatatttactaggtttatattttttttctgtggataaattgagcttcataaaactggatgttcatatccttctctaaatttagaaagattttctttgagacaggggctcactctgtcccccaagctgaagtgcagtggcatgatctcagctcactgcaacctctgcttttcaggctcaagtgatcttcccacatctgccacccaagtagctgaaactaaaggcatgtgccaccctgcctggctaatttttgtatttttttgtagagatgggattttgtcatattgcccaggctggtctcaaacacttaagctcaagccatgcacccaccttggcctctcagagtgctgggattacagatgtgagccacaaggctcagcctagatttggaaagttttcagacattatgtctttcaatctcctttattctttttctctgtcttcttctgaaaattctaaaatgtgtcaatttgttcactttatgattgattactttcaaatgacaagtttttgagtttgttgaattttcttttttataattgagtctcctgttaaaattttctactacacttcttcagttctgccattgtttaccttaactgcaggatttttgtgtggtcatttttatggtttttatttctctctctctctctctctctctctctctctctctctatatatatatatatatatatatatatatatgtataaaaaacatgagatgtcattttgctgtgttggccaggttggtcttgaactcctggtcccaagtaatgctcctgcctcagcatcccaaagttttattattataggtgtgggccaccatgcttggcctacttatgtattgtttctaattttgtttctgtgttgtttcctaaaaattttttagttatctgtgttctttgcatcttattgaaatttttaaagaaaattgttttcttttttaaaactttttgagatgaactctcactctgtcaccccagctggagtgcagaggcatgaccttgggtcactgcaacctctgcctcccaggttcatgtgattttcctgcctcagccacccgagtagctgggaatacaggtgcctgccaccacacctggctaatttttgtatttttagtaaagatggggtttcaacatattggtcaggctagtctagaactcatgatgtcatgtgatccacccaccttggcctccacaagtgctgggattacaggcatgagtcactgtgcccagccaggaagacttatttgagggaataataataataaaacaacaacaacaacaacaaaacttccatagctttgctagagatttacacattcagatacaaaaagctcaaagagcccccaggaaattcattacaaaaagataattacctaggctgtagtcatcaggttatctaatgtcaagatgaagaaaataatcttaagagctgtgaggtgaaagcatcaggttacctataaataaaaacctaccagattaacagcagacttttcagcagaaatattacaagtgagaagggattggcattctatctttagcctccttaaacaaaataattatcagccaagaattttgaatccagtgagataaaggaatataaatgaagaagagataaactctctttcacagaaacagatgctgagagaatttgccactgccaactcagcactacaagaaatgctgaaaggatatctaaatcttgaaacaaaacctcaaaatatacacgagtagactctccttaattcataaatcttacaggacctataaaacagtaacacaaagaaaaatatcaagatattcaggcaacagctggcatgatgaatccagcagtacctcacttctcactactaatgttgaatgtaactggcaaaagtgcttcgctttaaaaatacagaatagcagaataaataggaatccctacaacaagtagctgctgtctacaagagactcaatgtaagcatacaccaagaaactagagaaagaacaaatcaaactcaaacccggcagaagaaaagaaataacaaaaatctgaataaaatcagagaaaaactgaataaaattgaaacaaaaccacaaaagataaaacaagaatctggttctttgaaaagataaacaaaactgatatgccattagtgagattaactaaaagaagcagagagagaagctccaaataagctcaattagaaacaaaacgggagatattacaaccaataccacagaaatacaaaagattattcaaggctactaagaacacctttatgtgcacaaactagaaaacctagaaacaataattcttggaaaaaatataacccacctagattaaactacaaagaaataggcactctgaacagaccgataacaagtagtaggattgaaacagcaatttaaaaaattgtcattaacaaaaaagtccaggaccagatgaatttacaggtgaattctatcagacattcaaagatgaattggtaccaatcctactgaaactactccaaaaagtatagaaagtggaaatccttcctaaattattatatgaagccaatatcacctgaatatgaaaaccaggataggacataacacaaaaagaaagctgcactccaatgttcctgatgaaaatgaatttaaaaaattgtcaacaaaatactagctagccaaacacaacagcatatcaataagataatacaccatggtcaagtgcattttataccagggatgcagggataaatgtaatagaccacaaataaaattcaaaacaaaaattatacaatcatctcaatagatgcaaaaaaagcatttgataaaatccggtacctttttaagattaagaccctcagcaatatcagcatagaagggacataccttaacataatgaaagccatctatgacaaacccaaagaaaacattacactgaatggggaaaaattggaagcattccctctgtgaactgaaataagacaaggataggccgggcacggtggctcacgcctgtaatcccagcactttgggaggccaaggcgggtggatcatgaggtcaggagatcgagaccatcctggctaacaaggtgaaaccccgtctctactaaaaatacaaaaaattagccgggcgcggtggcgggcgcctgtagtcccagctactcgggaggctgaggcaggagaatggcgtgaacccgggaagcggagcttgcagtgagccgagattgcgccactgcagtccgcagtccggcctgggcaacagagcgagactccgtctcaaaaaaaaaaaaaaaaaaaaaaaaaaaaagacaaggatgcccactctcactctcaccacttctattcaacataatactggaggtcctagccagagcaatcagacaaaagaaagaaatagatggcatttaaattagtaaagaagtcaaactgtcactgtttactgatgcgtatgattgtatacctagaaagccctaaagactcatccaaataacttctagatctgttaaataagtccagtaaagtttcaggatacaaaataaatgtacacaaatcaatagcactgcaaaacataaacagctactaagctgaaaatccagtaaagaaccgaaaccctattacaacagctgcaaaaaatataaaataattagggccgagtgcggtggctcacgtttgtaatcccagcactttgtgaggctgaggattgcttgagctcagaagtttgagaccagcctggacaacatggcaaaaccccctctatacaaaaattagccaggcgtggtggtgcattcctataatccaagctacttgggaggctgaggcactagaattgcttgaacctgggaggtggagtttgcagtaagctgagatcacgccactgcactccagcctgggtgaaagagtaagactctgtctctaaataaataaataaataaaattaggaatatacttaaccaatgaggtaaaatgtccctacaaggcaaaccacaaaacactgctgaaaaaaatcatacataacacaaaaacacaccccatgctcatggatgggtagagtcaatattgtaaaaataaccatactgccaaaatctgtatacaaatttcatgcaatttccatcaaaatgtcatcattattattcacagaactagaaaaaacaatcctaaaattcatatggaaccaaaaaaaaaagcccacatagacaaaacaacactaagtaaaaagaacaatctgaaggcatcatgttacttgatgtcaaatcatatgacaaggctatagttaccaaaacagcatggtactggtagaaaaacaggcaggtagaccaatggaacagaatagtgaacccagaaatagagccaaatacttacagccaacttttttgacaaagtaaataagaacataaagtgggagaaaggacactctattcaacaaatgttgctgggataattggcaagccatatgtagaagaataaaactggaaactcatctctcaccttataaaaattcaacttaagatggatcaatcacttaaatgtaaggtctgaaactataaaaattgtagaagataccatcagaaaaatgattctagacatcggcttaggcaaaggttcatgaccaagaacctaacagcaaatgcaacaaaaacaaagataaatcaatgggccttaaactaaaatgcacaagtgggagaaaacttttataaactattcatctgacaaaggaataatatccagaatctacaaggagctcaaacagtcagcaataaaactaataattccatcaaaaagttggctaagaacatgaatagtcaattctaagaagatatacagatggccaacaaacatgaaaaaatcctcaatatccctaattatcagggaaatacaagttaaaacaataaagtgataccaccttctgcaagaatgaccataattaaaatatcaaaaaaatattacatgttcacattgatgtggtgaaaagggagcacttctacactgctggtgggaatgtaaactattaggctcgtgcaaaagtaatcacagttttgccattaaaagtaatgaaggccgagcgaggtggctcaggtctgtattcccagcactttgggaggccaaggagggtggatcacgaggtcaggagttccagaccatcctggctaacactgtgaaaccccgcctctactaaaaatacaaaaaattagccaggtgtggtggcacgtgcctatagtcccagctactagggaggctgaggcaggagaattgcttgaacccaggaggcagaggttgcagtgagccaaggtcacgctgctgcactccagcctcactccagagtgagactctgtctcaaaaaaaaaaaaaaagtttatttctgttttaatagtcagtaatcacttgctacatgtgtttcctgtatgtgatactgcagtctctctgctgctataacatttacatttggtctcagcagactcaaactgtcattccaaagtatcccatcatttctttcaccactttatgtaatgcagggaagaaactagggtctggaaaggccccttgaagccagaaataaatatgtacgtgccagtatttttcccatcttttaaaaaagaaaccaggactctccctctccctctccctctccccacggtctccctctccctctctttccacggtctccctctgatgccgagccgaagctggactgtactgccgccatctcagctcactgcaacctccctgcctgattctcctgcctcagcctgccgagtgcctgcgattgcaggcacgcgccgccacgcctgactggttttcatatttttttggtggaaacggggtttcactgtgttggctgggctggtctccagctcctaactgcaagtgatccgccagcctcggcctcccgaggtgccgggattgcagacagagtctcgttaactcagtgctcaatggtgcccaggctggagtgcagtggcatgatctcggctcactacaacctccacctcccagcctcctgccttggcttcccaaagtgccgagattgcagcctctgcctggccgccaccccatctgggaagtgaggatcctctctgcccagccacccatcgtctgggatgtgaggagcccctctgcctggctgcccagtctggaaagtgaggagcatctctgcccggctgccatcccatctaggaagtgaggagcgtctctgcctggccgcccatcgtctgagatgtggggagcacctctgccccgccgccccgtctgggatgtgaggagcgcctctgcccggccgcgaccccatctgggagatgaggagcgtctctgcccggcccccccgtctgagaagtgaggagaccctccgcccggcagctgccccgtctgagaagtgaggagcccctccgcccggcagccaccctgtctgggaagtgaggatcgtctccgcccggcagccaccccgtccgggagggaggtgggggtcagcccccacccagccagccgccccgtccgggagggaggtggggggtcagcctccccgcccggccagccgccccatctgggagggaggtgggggggtcagctcccccgcccggccagccgccccgtccgggaggtggggggcacctctgcccggccgcccctactgggaagtgaggagccccctctgcccggccaccaccccgtctgggaggtgtacccaacagctcattgagaacgggccatgatgacaatggcggttttgtggaatagaaaagggggaaacgtggggaaaagattgagaaatcggatggttgctgtgtctgtgtagaaagaagtagacatgggagacttttcattttgttctgtactaagaaaaattcttctgccttgggatcctgttgatctatgaccttacccccaatcctgtgctctctgaaacatgtgctgtgtccactcagggttaaatggaaaaaaaaaaaaaaaaaagaaaccaggagttggcaattacttttttttttttaaagacagagtcttgctctgtcacccaggctgaagtgcagtggtgagatcttggctcactgcaacctccacctcccaagttcaagtgattctcatgcctcagccttcagagtaactgggattacaggtgtatgccaccatacctggcaaatttttaaatttttagtagagatgagcttttgctattttgtctaggttggtttcaaaattctgaccttgggtgatccacctttctctgcctcccaaagggcttggattacaggtgttagccatcatgaccagccagcaatttactgctaaaaaagctttgttatcttagggatcaggaaaagctgtgttgcgtaactgtaacacaatctttctatgtggctctttacattgtttttacctgggcattgcacacagttaacccatttataaattttctgcaagtgtattttggtcagtatgtttttgttacatgtatatgtctataaaagaattagggcctgtggtattttgctgtgccatcttgcttatgtagtttgtacaattttataggttagattagtgaagtatatttatctgagtctagcaactggagtaatttgttatttttatttctttcagttacgtgttctcattttgctcaagacctgtggccagagcagggcatgaaagattccttccaaaacttgataccgagaacatatgcaaagtgtggagatgagaatttacaactaagaaaaaactgcaaaagtgtggatgatggtaggatgcacaaaggaggttataatggatgcaatcaatgtttgacatcgacccagagcaaaatatttcgtggtgataaatatgtgaaagtcttttataaatatccaaattcaaataataataaaataagatatactgaaaaaattctttcaaatgtaaataatgtggcaaatcattttgcatgctttcacacctaactcaacataagaaaattcatactagagagaattcctacacatgtgaagaatgtagcaaagtctttaaatgttcatgaccctcactcaacataaaagaattcacactaaaaagacactgttcaaatgtgaagaatgtggcaaagcttttaaacagtcctcaaatcttactgaacataagagaattcctactagagagaaacactacaaatgtgaagaatttggcaaagattttaagtggtcttcaaatcttcctgaaaatgagataattcatattggagaaaaaccttgtaaatgtgaagaatgtggcaaaacttttaagtggtcttcaaacattactggacataagataattcatactggagagaaactatacaaatgtgaagaatgtggcaaagccttttactcctcctcaaaccttactttacataaaatgattcatactgcagagaaaacctacaaatgtaaagaatgtggcaaatcttttagccagtactcacaccttactacccataagggaattcatactggaaagaaaacctacaaatgtaaagaatgtggcagagcttataagtggtcctcaaaccttactgaacataagataactcagaactggagagaaaccctacaaatgtgaagaatgtagcaaagcctttaactggtccttacaccttgctgtacataagataattcatactgaagagaaaccctacaaatgtgaagaatgtggcaaagcctttaaatggtcctcaaaccttactaagcataagataatttatactggagagaaactctagaatttgaagaatgtggcaatgcttttaagtggtcctcaaaacttactgaacagctttcgggtgatgacaaccttcccacaagaggacatgcctctcacaaaggatctccttcatccctctccagaagagaagaggaaacacaagaagaaacgcctggtgcagagccccaattcctacttcatggatgtgaaatgcccaggatgctataaagtcaccacggtctttagtcatgcacaaatggtagttttgtgtgttggctgctccactgtcctctgccagcctacaggaggaaaagcaaggcttacagaaggatgttccttcaggaggaagcagcactaaaagcactctgaatcaagatgagtgggaaaccatctcaataaacacattttggattaaaaaaaacttactgaacgtaagataattcatacttgagaaaacctacaaatgtgaagaatgtagcaaagcttttactcatctctcaatccatgctaaacataaaataatttatgctggagagaaaacttacaaatgtaaagaatgtggcaaagcctgtaaccattcctcacatcttactacacgtaagtcatactgaagagaaattacaaatgtgaagaatgtggcaaagcctttaataagtccccagatcatacttgagaaaaacttcacaaacctgaaagatgtgacaatgcttttgacaacacctcaaacctttctaaacataaaagaaatcatactggtgagaaagtctaaaaatgtgaggaatatgacaaagtctttaaatggtagtcatgcttaattgtaggtaagataattcatactggagaaaacttctacaagtgtgaagaatgtggcaaaacctttaaccaatgctcacaccttattgcacaggaaaccatttatatttgagaaaaattgtataaatttaaagactatagaaaagccattgatatctgctcacatcttactcaacatcagagagttcatacttaataaaagcattataaatgcaattactcttaaaaggtctttcagaaaatataagcctataatgtgaaaaagtatttattctgaggacaaaccttacaaatataaaaaggattgtagtgtagcaggatgagccacagacaaaactcctcagacactgcgttaaagaaggaaggggtttattctgcagggggtattggcaagactcctgtctcaagagccgagctccctgagtgagcaattcctgtcccttttaagggctcacaactctaagggtgtgcacgtgagagggtcatgattgagcaagcagggggtagatgactgggggctgcatgcatcggtaattagatcggaacaaaacaggatagggattttcacagtgcttttctatacaatgtctgtaatctatagataacataactgattaggtcaggggtcaatctttaactaccaggcccagggtgtggcaccgagctgtctgctcgtggatttcatttctgccttttagtttttactttgtctttctttggaggcagaaagtgggcttaaaacaatatgaggggtggtctcctcccttagtagtacctttacttgtatcacagatcttattgtatatatttcatactagaggaaaaccctaaagaagttgctcaaactttgttcaatatcaggaaatttatactggagaaaaaccctgcaaatgtaatgaatttgaaagaaacacatttcaaaaactacagcttagaaaacatcatagagtttatactaagatatatttttgtaaatgaagtaaatataaaaaatacttcaaaactaactttatgtaaatcacagagaatacacagtagaaataaggcacttactcttcagacattacattaaatcagagagttgagtatagaaaataatcccaaactaaaattatttgataagttattagtatataactttaaaagaagtagaagattttttgtagggttataattacattcaaagtatacttttttattattacagatttttttgaaaagcaaataatgatgtaatttaactctcaaattacttcatgctctccattcctattgtatttacatgtgaaagcatgtgatcaaatattactgcattacagatataagagattcttttttattacgtaggcattatttatgaccttttccatggaagagtaagaacattaaaatataaaacacataatgaaaatttaagtagagaggctcattatggttaacttataatgttaagtgatgtatgaggtaggtgttctgagtaatatttttgtccactatagtgaaaaaaactttttaagttttagttaaaattaattaaattagcagtaacttattaattgtacttttatgtaatatgcagtacatttaaaaatttttcagttatatgtgaatttaattttctagtaaaacattgtttaaaatgtaacatctattgtacattcaatgaagtgttttttttttttttttttgagatggcgtcccactctgtcacccaggctggagtgtggtggcatgatcttggcacactgtaacctccgcctcccaggttcaagcaattctcctgcctcagcctcccaagtagctgggattacaggcacttgccaccatgcccagctaatttttgtatttttagtagagatggggactcaccatgttggccaggctggtctcaaactcctcacctcaagtgatccacataaatggcatattttggtacaggcatataatatgtaataacgacattagagtacatgaggtatccatcaccactagtatttgttctttgtattacaaacaatccaattctacacctttagctatttttaaatgtacaattgttattgagtacaggataaattttatggtcataattaaaattatataaataaaattcatacatatctgagtcctaaaaaaaactttcaaaaatttgttttttatatatatatatttttcaacatgtggcaactctgcctgcaaacacatacatacagaattttagttttgatttcaatcaggttaaatatacacatatattattttaaagataacactaggtatatgcaaattatgatgaatgtgtgtgtaagtatgagtcagggcatattttcagaagaaaacaataaatttttttttttttttgagacagaatatcgctctgtcgcccaggctggagtgcagtggagcgatctctgctcactgcaagctcctcctcctgggttcacgccattctcctgcctcagcctcccaagtagctgggactacaggcacccgccaccacgcctggctaattttttgtatttttagtagatatggggtttcaccatgttagccaggatggtctcgatctcctaacctcgtgatccacctgcctcggcctcccaaagtgttgggattacaggtgtgagccaccatgcccagccataaatttttttattaaggcgactaatttagtagaaaactaaaaacctaaaaaatgtggaaagcaattctatactgtctgctttgtattgaattctttaaaattgtatggcttatggttcagagtctccccatgcaatttgcctggttttacttgcttggtactctttgctagacccataattttcttgtttcttattttttttgttttgtagtttatgcagtattcattatgtgagctggtcagggattataatgatttttatgaaatttaatagtgcacacaaaataatttgtagatgtaattttacaattagtgtatgaagttatgttttatttaattagaagattccattctgttcttttacttggagaatactatataagcccacttttatttagttactgttcctttcagattttaaaattgtcataagttaatttatttatttattgagcaaatttgttcaggtaagtactagggtggcttccataagtcaagaggatgtttttgtatataaatgcagcaaatgaacatggcagtgcttgctgtgtagcagatgcttcatgataagccataagtattcctcctggagttagtttgtaacttcaagtcagagagagaaaatatcaatggtgaagaaataacgttgatttgtcatgtgaagaggattttttttttttttttttttggctgcacagctgactcttgctgaatttaaagagaaaatctgctttttttatttttatttttgagatagagtttcgctcttgttacccaggctggagcacaaggcatgatctcggctcactgcaacctctgtctctcgggttcaagcgattctcttgcctcagcctcccgagtagctgggattacaggtatgtgccaccatgcctggctaattttgtatttttagtagagatgggatttctccatgttggtcaggctggtctcgaactcccgacctcaggtgatccacctgccttggcctcccaaagtgctgggattacaggtgtgagccactgcgcctggccaattctacttcttatattaccaaattatctcatgtttgtttgtctcattatcggcattccaactatgtatgcatcacagacctttttttttctgtgttacagctacagtatcctcactgttgtcttcatgccatgtcatttcacactgtactttgtaggttttgataaggaagttggtattttagtaatgcactgaaaaattagttttaactgaagaattagcttatcaatataactttcatatcagttaattaagaggcggctgggcacggtggctcatgcctgtaatcccagcactttgggaggctgaagtgggtggatcatgaggtcagaattcaaggccagcctggccaagatgctgaaaccctgtctctactaaaatacaaaaattagcccggcatggtggcaggtgcctgtaatcccagctactcgggaggctgtggcaggagaatcgcttgaaccccagggggcagaggttgcagtgagccgagatcgcgccactgcattccagtctgggcaacagagtgagactctgtctcaaaacaaaacaaaacaaaacaagcaaacaaacaaaaaatgcattcactgtccacaggtgagagaaataaatcagttagcactgtttttctttgtaacagaaaaatctcattagattcttacacaaagtgtaaatataaaatttgttagaaaatatatcttacaaattaagtttttaagacttattcacaagtaaaaaagttttaatttaattttttatgatatagcacaacttatgttctcatgcagaatcttttgtctttaagtgataatgttaaattttgcaaaataataaaatgaaccctgtggatttgaaattcaaaataatatttctgtttcatattgatattacaattttgaggagtttctcttattgtatataagatttttagtggatgaagttcagtctacagtttttattcttcgtcacctaactgtagccaacaccttgctcatttttttttttttctggaaaaaattttaaagatcatagcagctttttgattaaaacattttccgttattttgcacgcaaacttgtttactgtattcacagagtgccctgttatgggaccataagcaacacctgctttcttagtgtcttttatacctttattatcagcaccaaaaacttcatgtgccctcaagcttaaaataaaagccctaatgtacattggcttctcccatgcactgtgctgggttcagaacatgctgataaatatcagagtttctgtgattgtgactgagaaattaaatggcaggagcagcacagaaaccatatgtttttgatactatttagccaaatcaatgacaaagagacagtattttacacactggtattcttctgtaatatttttaaaatatctttttaacttgacagataagcatatttattctgtaaaacatgatgttttaaagtatatatacattgttaaatgcttaattttaggtaattaatgcttcacctcacatagttaaaatttttatggtgagaccacattgacattgtcttagcattttaaaaaaatataataaattattatttttttcttattttatgttccagagtagatgtgcaagtttgttacataggtgaatgtgttacataggtaaatgtgtgccatggtggttagctgcacctatcaacccatcacctaagtattaagcccggtgtgcattagctgtttttcctgatgctcttcctaccctgccctctcctgacaggcctcagtgtgtgttgcttctctcctggtgtccatgtgttcttattgtttagcttgcacttacaagtgagaacaggacgtgttttgccttctgttcttgtgatagtttgctgaggataatggcttcgagcttcattcatgtctctgtgaaggacataatctcactacttttcatggctgtatagtattacattgtttatatgtaccaagtattctttaactagtctatcattaatgggcatttgggttgatatcatgtttttgctattgtgaatagtgcagcaatgaacatacacatgcatgtatctttataatagaatgatttatattatttttagtatataccaaggaatggagttgctgggtcaaatggtgtttctggttttaaatctttcaggaattgccacactgtcttttctaataattgaactaatttacattcctaccaacagtatataagcattcctgtttctctgcaacatagccagcatctgttgtttcttgactttttaataaccaccattctgactgacatgaaatggtatctcattgtggttttgatttgcatttctctgatgattagtgatggtgagctttttctcacaggtttgttagctacatgtatgtcttcttttgaaaagtgtttgttcagccaggtgcagtggctcacgcctgtaatctcagcactttgggaggccgagggtggggggggggtcagaccatgaggtcaggagttcgagaccagcctgactaacgtggtgaaaccctgtatctactaaaaatacaaaacttagctaggcgtggtggcacatgcctgtagtcccagctattcaggaggctgaggcaggagaatcacttgaacccaggaggaggaggttgcagtgagccaagatcatgccactgcactccagcctgggtgacagcaagactccatctcaagaaagaataaagtgttcatgttctttgcccagttttttatagggttgtttgttttttttcttataaatttgtgtaagttccctctagattctggatattagacctttgtaagatagattgcaaaaattttctccttttctgtaggttgtctgtttggtctgatgatagtttctttttatgtgcagaagctctttagtttaattagatcctaattcatcaatttttgctttttgtgcaaatgcttctgatgattttatcataaaatatttccccatgcctatgtcctcaattgcattgcctagattcttttccagggttcttatagttttgggcttatatttaagtcttcaattcagcttgagttattttctatgagatataaggaagaggtccagtttcaattttctacatatggctagccagttctcccagcatgatttattaaatagaaaaaaattttttccattgcttgtttttgtcaagtttgttgaagatcagatggttgtagacacgcagttttatttctcatttctctattctgttctatgtggcctatgtgtctgtttttgaaatggtaccattcttgttttagttactgtagccttgtagtatactttgaagtcaggtaatgtaatgccttcagctctgttctttttgcctaagattgtcctggctatatgggctattttgtttgtttgtttgtttgtttgttttgagacagagtctcaccctgtcacccaggctggagtgcaatggtgctatctcagctcactgcaatctccgcctcctgggttcaagtgattctcctgccccagcctcctgagtagctgggaattcagatgcccacaactatgcccagctaatttttgtatttttagtagagatgagatatcatcatgttagactggtctcaaactcctgacctcaggtgatctgcctgcctcggcctcccaaagtgctgggattacaggtgtgagccatcacacccagtctatgggctcttttttggttccatacaaattttaatatagcttttcctaattctgtgaagaatgtcaatggtagtttaatgggaataccattgaatctataaattactttgaacagtatggccattttcacaatattgattcttcctatccatgtgcatagaatgttttttcatctgtttttgtcctctaatttccttgagcagtgttttgtagttctccttaaggaggtctttcactttccttgttagctgtattcctaggtactttattctttttgtggcaattgtgaatgggatttcattcacaatttggctctctgcttgtctgttggtgcacaggaatgcttgtaatttctgcacatttagtctgtatactgagactttgctgaagtagtcttatcagcttaagaagcttttgaactgagtaaatagggttttctaaatataggatcacatcatctgaaaacaaagacaatttgacttactctattccagtatgaaaattattttttatccttgcctgattgccctgaccagaacttccaataatatgttcaataagaatggtgagagagtgcattcttgccttgcactggtttccaaggggaaatgtttccagtttttacccagtcagtatgatattggctgcagggtttgtcataaatggcccttattattttgaggtatgttccttcaatacctagtttattaagagttttttatttgttgttgttgttttgagacagagtttcactcttgttgcccaggctggagtgcaatggtgctatcttggctcactgcaacctccacctcctgggtttaagcgattctcctgcctcagcctcccgagtagctgggattacaggcatgtgccactacacccggctaattttatatttttagtagagacggggtttctccatgttggtcaggctggtctcaaactcccgacctcatgtgatccacccacctctgcctcccaaagtgctgggattacaggtgtgaggcaccacacctggcctatgaagagtttttaacatgaagggatgttgaattttattgatggactttcctgcatctattgagataatcatgtgggttctttttttttttttttttagatctgcttatatgatgaattacattttttttttttagatctgcttatatgatgaattacatttattgatttgcatatgttgaaccagccttgcatcttgggaatgaagccaacttgatcatggtggatgagctttttgatgtgctggtgtattcagtttgcaagtattttattgataatttctgcattgatgttaattagtgataatatcctgaagttttcattttttgttgtatctctgccaggtttttgtatcaggatgatgctggcctcatacaatgtgttagggagaagtccctcctttttaattttttggaatagtgcataagaaagggtatcaacacctttttgtagttctggtagaattcagctgtaaattcatctggtcctgggctttttcttgttggtaggctattattgctccaatttcagaatttgttattggtctattcagggattcaacttctttctggttcagtctgaggagggtgtatttgttcaggagtttatccatttcttctaggttttctagtttatttgcatagaggtgtttatagtattatctgatggttatttgtatttctgcagggtaagtggtggtatcccccttctcatttctgattatgtttatttgaatcttctctcttctcttatttagtagtttagctagcaatctatctattttattgattttttttcaataaatctgcttctgaattcattaattttttgagtaatttttaatgtttctatctttcatagttccactctgagcttggttatttcttctgctagctctggggtttgtttgctcttggttctctagttcttttagctgtgatgttaggatttcaatttgagatctttctagctttttgatatgggcatttagtgctataaattttcctcttaaactgctttacctgtgtcccagaaattctggtatgttgtatctttgttctcattagtttcagaatttttttaatttctgccttaatctcattatatacccagaagtcattcaggagcaatttgttcaatttccttgtagttgtgtggttttaagtgagtttttaaatcttgagttataattcgattgcactgtggtctgagagactgttatgattttagttattttgcattttctaaggagtgtttcacttctaattatgtagtatattttagagtgagtgccatgtggcaccaagaaaaatgtatattatgttgtttttgtggggagagttctgtagatatctatcaggttcacttgatccagagctgagttcaagtcctgattatctttgttcattttctgtctcaatgaactgtctaatattgacactggggtattaaagtctcccactatttggccaggcgtggtggctcacaagtgctgtaatcccagcactttgggaggccgaggcaggtggatcacaaggtcaggagattgagaccatcctggctaacatggtgaaaccccatctctactaaaaaaaaaaaaaaaaaaatacaaaaaattagccaggcatggtggcgggtgcctgtactcctagctactcaggaggctaaggcaggagaatggtgtgaatctgggaggtggaacttgcagtgagctgagatcgcaccattgcactccagcctgggtgacagagtgagactctgtctcaaaaaaaataaataaataataaagtctcccattattattgtgggggagtctaagtctctttgtaggtttttgagaacttgttttatgaatctgcgtgcttctgtaatggttgcatatatatttaggatagttggcactttgtgttgaattgaaccatattctgttatgtaatgatcttttttttacctttgttggtttaaagtctattttgtcagaaacaaggattgcatctcctccttttttctgctttccatttgcttggtaaattcttttccatccctttattttgaacctatgtgttctctgcacatgaaatgtgtctcttgaatacagcacagtgatgagtcttgtctttttatccagcttgccattctgtgtcttttaactggggcatttagctcatttacatttaaagttaatattgttatatgtgaatttgatcctgtcatcatgatgctggctggttaattttgcagacttgttaatgtagttgcttcagtgttattggtctgtgtacttcaatgtctttttatggtgggtggtaacggatttcctttccatgtttagtgcttccttcaagagtttttgcaaggcaggatgaaatccttggtcattagcttgtctgcaaaggattttatttcttctttacttatgaagcttagtttggccagatatgtattctgggttgaaaattcttttcattaagaatgttgaatattggtccccaatctcttctggcttgtagggtttccactgagaggtttgctgttagtctgatgagcttccctttgttggtgacctggtctttctctctggctgcccttaactttttttttttatttcaaccttggagaatctgatgattatgtttttggggtggatggttcatggagtatcttattagggttctctggattttctggatttgaatgttggcctgtcttgccaggttggggaagttctcctggatgatctcctgaagtgtgttttccaacttggttccattctccccatctcttttaggtatgccagtcatttgcaggtttggtctttttacatagttccatagttctcagagtttttgttcattcctctttatttttttccctctaatcttgtctgcttgccttattgcagcaagatagtcttcgagtgctcacagtctttctttctcttggtcaattcagctattgatacttgtgtttgcatcatgcagttctcatgctctgtttttcagctccattggatcatttatgtttctttttaaactggttatctagttaacaactcctgtaatcttttattatggtccttagcttctttgaattgggttacaacataatcctttagctcagtgaagttcattattgcttactcacctcctgaagcctacttttgtcagttcatttatctgagcttcagccgagttctgtgtccttgctggagaggtttttttgcgatctattggagaagacgcattctggcttttggaattgtaagcatatttgcattggtttttcctcatctttgtggatttatctacctttgagatttgaatgaggttttttgtggtcgtcttgatgttgctgcttttttctctcttttttaacagtcttctcttctgcaggtctgctgcagtttgctgggggtcagtccactccagatgctgttcacctgggtatcaccagtgaaggctgcggaacagcaaagattgccacctgctccttcctctggaagcttcttcccctggaagcttcttcccacagggacactgacctgatgccagcctgaactctcctgtatgaggtgtcgggaacccctgttgggaggtctcacccagtcaggaggcacagattcaggaactgatttaaagaagcagattggatgctcctcactggtgtcagtgtattgtgctgtggggaatctccctcgtccagatcatcaggacacttcagagccagcaggcagaaaagattatacccactgaaccttagattatgaccgcccctcccccaggtgctctgacccagagagatgaaagttctgtctgtaaacttacagctgaagttcctggaatttgtccagggagactctgcccagtaaggacagatgtatccgtttcccacttaaagaagcagtctggccatgatctgccacagccactgtggctgtgctctggggactttcgcccagtccaaacctcagtctgtctaccactggcagaggaaaactaccaactagagtcacagttacggcagtcacctgtctctccaaaataaacttggttgcattatgcatacttcaggctgctttgctggccagcaggcattccaatccagtggtcttaccttgtggtattcaatgggagtgggatctgctgagtgagaccgcttggcacactggctttagtccccttcccacataagtgaatgaatctcctgcctcatgagttctggaagccactggagtttgcaaaaattcctgcaactaagtgcctgcctgaatggccgctgaccttagcagctgccacaggtccacacagctttgtgcttggaatgcaagggcctgttagtgtgggagcaaaagggactctcctaaaccacaaattgcaaaaatccataggaaaagtgtagtttttcacctgggtaacataatctctcactgcgtttctcggctgggggagggagttccctttcaccctgtgcaggtcctgggtgaactgtggccccaccctgctttttcttgttctctgtggtcacaccaactgcctagtcagttccagtgagagaatctaggtacttcagttagaaatgccgaattcacctgctgtttaaattcggtgggagttgcagaccggagctgtttctacttggccatctgggcccttcccaatataacacattattattaactatagacaccatgctgtacaatatatctcttgaatgtattcctcctatccaactataattatgtattgtctgacagacatcttcccaaacacccctttcttttaaattccttgggatctggtggtcaccattttactctctgcttcaatgaaattaagttttatagaatccatgtgtaggcgaaagtatgaaattttaatctttctgtgcctggcttatttcaagaaatataatgttctccaagttaatccatgtaattgaacataatagaattttcttttttaaaaataaatagtattttattgtgtgtatataccatactgtctttatttactcattagatgttgaactgttgcttctatattttggctgttgtgaagagtgttgcaaacaacagagaggtgcaaatgtttcttcattctcactttatttctcttaaatatatatgcaatagtgaaattgctgtattatagggtagtttgattttaaattttttgagaaatctctactttgtttttcttaatggctggcctcatttacattcacatcaacagtgtgcaagcattctcttcacatatttatcttttttttttctttttctttctaataggagtcattctaataagagcgagttgatatattatagattttttggctctcctctccctgataataattgacattgagggttttttttttttttttcgctgagtttcactctgttgcccagactggagtgcagtgtcacactctctgctcactgcagcctctgcctcccgggttcagcaattctcctgcctcagtctcccgagtagctgggattacaggtgcccaccaccatgcccagctaatttttgtatttttagtagaaactgagtttcgccatgttggccaggctagtctcaaactcctgacctcaagtgacccacctgccttggcctcccaaagtgctgggattacaggcatgagccactgcactcgggccacattgagaattttttaatatatctattggccatatgtatcttttcttaaaaaatatttaagccctttgctcattttagtagttatttgttttttgttgtatagtcatttgagtttcttacatattcttaatattaaccccttgtcaaatgtataaattgcaaaaaaaaattttagttttctcattttaagtgtgtcagattctgcacagcagctttataatttgaactaatcttactcatctattttttattttgttccctgggattttgagtttaaatcaaaaaaagttacagcccagactgatgttatggggctttcagtctatattttttgtagtagtctcagagtttcaggccttgcatttaagaatttatttgatttttatatatgaagtaagatgagggttgcattttattgctctgcatgttgctattaagtttttctcagcgccatttattgaagatactgttctttttctaagaaattgttacctttatctaaaatcagttagctggaagtacacagatatatttctaatttcccttttctgctccattggcctatgtgtctgttttttgttcaagtaccatactgttttatttgctttagctttgtagtatatttctttttttcttattattattatattttaagttttagggtacatgtgcacaacgtgcaggttagttacatatgtatacatgtgccatgctggtgtgctggctttgcagtatacttcaaagtcagatagggtgataacttctgtctttcttatttgctggagttctttgactattcagagtcttttgtggtaccataaaattttaaattttttaaaattttctattaaatatgtcaccggtattttgatagaggttgcattgtatctgtacatcattttgtgtaataaacatatttaacaatattaataactccaatgatgaatgagtaatgttttccatttgcatatgattttattttaatgttctttagattataatgtacaaatgtttcaactttttagttaaatttatttcaagttatagttactacagttagtgtagatgagattgttttgcattataatttcattttgagataattataagtgtatagaaatgctactgacaaattggcacctaattaaactaaagggcttctgcacagcaaaacaaactattgacaaacagacaacctaaagtataaaataaaatatttgcaagctgaatacaacataagattaatatatagaatctataagaaacttaatcagaaaaaagcaaatgatctaaatagacagtactcaaagaaagatataaaagctgttaatagggcagttccaagatagccgaacaggaacagctccagtctacagctcccagcatgagcgatgcagaaggtgggtgctttctgcatttccaactgaggcactgggttcatctcactggggattgtcggacagtgggtgcagcacactgagcatgagccaaagcagggcaaggcatcacctcacctgggaagtgcaaggggccagggaattccctttcctagccaagggaagcggtgacaaacagcacctggaaaatcaggtcactcccaccataacactgtgcttttccaatggtcttagcaaatggcacaccaggagattatatcctgtgcatggctcagagggtcctacacccacggatcctcgctcattgctaccacagcagtctgagatcgaactgcaaggtagcagcaaggctgggggaggggcgcccaccattgctgaggcttgagtaggtaaacaagtggctgggaagatcgaactggctggagcccaccactgctcaaggaggcctgcctacctctgtagactccacctctgggggcagggcatagccaaacaaaaggcagcagaaacctccacagacttaaatgtccctgtatgacagcttggaagagagtagtggttctcccagcacggagcttgagatctgagaatggacagactgcattctcacgtgggtcccagacccccaagtagcctaactgggaggcatcccccagtaggggcagactgacacctcacacagccaggtagccctctgagacaaaacttccacaggaatgatcaggcagcaatatttgctgttcaccaatattcgctgttctgcagcctccactgctgtcacccagcaaatgaggtctggagtggacctccggcaaactccacctgacctgcagctgaggatcctgatggttagaaggaaaactaacaaacagaaaggacatccacaccaaaaccccatctgtaagtcaccatcatcaaagaccaaaggtagataaaaccacaaagatggggaaaaaacagagcagaaaaactgaaaattctaaaaatctgagcacctctcctcctccaaaggaatgcagctcctcaccagcaatggaacaaagctggatggagaatgactttgacgagttgagagaagaaggttccagacgatcaaacttctctgagctaaaggaggaagtttgaacccatggcaaagaagttaaacaccttgaaaaaagattagacgaatggctaactaaaataaccaacgcagagaagtccttaaaagacctgatggagctgaaaaccatggcaagagaactacgtgatgaatgcacaagcttcagtagcagatttgatcaactggaagaaagggtatcagtgatggaagatcaaatgaatgaaatgaagtgagaagagcagtttagagaaaaaagaataaaaagaaacaaagcctccaagaaatatgggactatgtgaaaagaccaaatctacgtctgattggtgtacctgaaagtgacggggagaatggaaccaagttggaaaacactctgcaggatattatccaggagaacttccccaatctagcaaggcaggccaacattcagattcaggaaatacagagaaggccacaaagatactcctcgagaagagcaactccaagacacataattgtcagattcaccaaagttgaaatgaaggaaaaaatgttaagggcagccagggagaaagatcgggttacccacaaagggaagcccatcagactaacagcggatctctcagcagatactctagaagccagaagagagtggggaccaatattcaacattcttaaagaaaagaattttcaacccagaatttcatatccagccaaactaagcttcataagtgaaggagaaataaaatcctttacacacaagcaaatgctgagagattttgtcaccatcaggcctgccctacaagagctcctgaaggaagcactaaacatggaaaggaataagaggtaccagccactgcaaaaacatgccaaattgtaaagaccatcaatgctaggaagaaactacatcaactaacgagcaaaataaccagctaacatcataatgacaggatcaaattcacacgtaacaatattaaccttaaatgtaaatgggctaaatgctccaattaaaagacacagactggcaaattggataaagagtcaagacccatcagtgtgctgtattcaggaaacccatctcatgtgcagagacacacataggctgaaaataaagggatggaggaagatctaccaagcaaatagaaaacaaaaaaaggcaggggttgcaatcctagtctctgataaaacagactttaaaccaacaaagatcaaaagagacaaagaaggccattacataatggtaaagtgatcaattcaacaagaagagctaactctcttaaatatatatgaacccaatacaatacaggagcacccatattcataaagcaagtccttagagacctacaaagagacttagactcccacacaataataatgcgagactttaatacctcactgtcaacattagacagatcaacgagacagaaagttaacaaggatatccaggaattgaactcagctctgcaccaagcagacctaatagacatctacagaactttccaccccaaatcaacagaatatacattcttcttagcaccacactgcacttattccaaaattgaccacatagttggaagtaaagctctcctcagcaaatgtaaaagaacagaaattataacaaactgtctctcagaccacagtgcaatcaaactagaactcaggaataagaaactcactcaaaaccactccaactacatggaaactgaacaacgtgctcctgaatgactactgggtacataatgaaatgaagacagaaataaagatattctttgaaaccaacgagaccaaagacacaacatgccagaatctctgggacacattgaaagtagtgtgtagacggaaatttatagcgctaaatggccacaagagaaagcaggaaagatctaaaattgacaccctaacatcacaattaaaagaactagagaagcaagagcaaacacattcaaaagttagcagatggcaagaaataactaagatcagagcagaactgaaggagatagagacacaaaaaaaaccttcaaaaaatcaacgaatccaggagctggttttttgaaaagagcaacaaaattgatagaccactagcaagactaataaagaagaaaagagagaagaatcaaatagatgcaataaaaaatgataaacgggttttttgaaaagatcaaaaaaattgatagaccactagcaagactaacaaagaagaaaagagagaagaataaaatagacgcaataaaaaatgataaaggggatatcaccaccaatcccacggaaatacaaactaccatcagagaatactataaacacctctacccaaataaactagaaaatctagaagaaatggataaattccttgacacatacactctcccaagactaaaccagcaagaagttgaatctctgaatagaccaaaacaggctctgaaattgaggcaataattaataacttaccaaccaaaaaaagtccaggaccagacggattcacagccgaattcttccagaggtacaaggaggagctggtaccattccttctgaaactattccaatcaatagaaaaagagggaatcctccctaactcattttatgaggccagcatcatcctgataccaaagcctggcagagacacaacaaaaaaagagaattttagaccaatatctctgatgaacatcgatgcaaaaattctcaataaaatactggcaaacccaatccagcagcacatcaaaaagcttatccaccatgatcaagtgggcttcatccctgggatgcaaggctggttcaacatacacaaatcaataaacgtaatccatcatataaacagaaccaaagacaaaaaccacatgattatctcaatagatgcagaaaaggcctttgacaaaattcaacaacccttcatgctaaaaactctcaataaattaggtattgatgggacatatctcaaaataataacagctatctatgacaaacccacagccaatatcatactgaatggacaaaaactggaagcattccctttgaaaactggcacaagacagggatgtcctctctcaccgctcctattcaacatagtgttggaagttctggcgagagcaatcaggcaggagaaagaaataaagggtattcaattaagaaaagagggagtcaaattgtccctgtttgcagatgacatgattgtatatctagaaaaccccatcgtctcagcccaaaatctccttaagctgacaagcaaattcagcaaagtctcaggatacaaaatcaatgtgcaaaaatcacaagcattcttatacaccagtaacagacaaacagagagccaaatcatgagtgaactcccattcacaattgcttcaaagagaataaaatacctaggaatccaacttacaagggatgtgaaggacctcttcaaggagaactacaaaccactgttcaatgaaataaaaaaggatacaaacaaatggaagaacattccatgctcatggataggaaggatcaatatcatgaaaatggctatactgcccaaggtaatttatagattcaatgccatccccaacaagctaccaatgactttcttcacagaattggaaaaaacgactttaaagttcatatggaaccaaaaaaagagcccacattgccaagtcaatcctaagccaaaagaacaaagctggaggcatcacactacctgacttcaaactatactacaaggctacagtaaccaaaacagcatagtacttgtaccaaaacagacatacagaccaatggaacagaacagagccctcagaaataatgccacacatctacaactatctgatatttgacaaacctgacaaaaaaagaaatggggaaaggattccctatttaacaaattgtgctgggaaaactggctagccatatgtagaaagctgaaactggatcccttccttacaccttatactaaaattaattcaagatggattaaagacttaaatgttagacctaaaaccataaaaaccctagaagaaaataaaggcaataccattcaggacataggcatgggcaaggacttcatgtctaaaacaccaaaagcaatggcaacaaaagccaaaattgacaaatgggatctaattaaactaaagagcttctgcacagcaaaagaaactaccatcagagtgaacaggcaacctacagaatgggagaaaatttttgcaatctactcatcgacaaagggctaatatccagaatctacaaagaactccaacaaatttacaagaaaaaacaaacaaccccatcaacaaatgggtgaaggatatgaacagacacttctcaaaagaagatatttatgcagccaacagacaatgaaaaaatgctcagcatcactggccatcagagaaatgcaaatcaaaaccacaatgagataccatctcacaccagttagaatggcgaccattaaaaagtcaggaaacaacaggtgctggagaggatgtggagaaataggaacacttttactctcttggtaggactataaactagttcaacctttgtggaagacagtgtggtgattcctcagggatctagaactagaaataccatttgacccagccatcccattacgggatatacacccaaaggattataaatcatgctgctataaagacacatgcacaagtatgtttattgtggcactattcacaatagcaaagacctggaaccaaccctaatgtccaacaatgagagactggattaagaaaatatggcacatatacaccatggaatactatgcagccataaaaaatgatgagttcatgtcctttgtagggacatggatgaagctggaaatcatcattgtcagcaaactatcgcaaggacaaaaaaccaaacattgcatgttctcactcataggtgggaattgaacaatgagaacacttggacacaggaagggggacatcacacaccggggcctgttgtggggtggggggaggagggagggatagcattaggagatacacctaatgtaaatgacaagttaatgggtgcagcacaccaacatggcatatgtatacatatgtaacaaacctgcacgttgtgcacatgtaccctagaacttaaagtataataattttaaaaaagctgttaataaacatgcaaaaaattgctaaacattcctaatagagagacataaatcaaaatgacaatgtcatatcatcccacatccgttagattggctgttgttagaaagtcaaaaaataacagatgtttaagttatggagaaaaggaaatcttgaaacactgtgaaaatgcaaattaattcagccccaatgaaaagcagtttggagatttctcaaagaactaagaatataattgccatttgacccatcagtcatattactgggtatatacccaaaggaaaaataaattattttatcaaaaagacacctgcattcatctgtttattactgcattattcacaatagcaaaaacataatttttttttgagacagagtcttgctcttgttgctcagcatggcacggtctcgactcactgcaacctccacctcccaggttcaagtgattctcctgcctcagcctcccaagtagctggcattacaggcacccaccaacacacctggctaatttttgtattttcagtagagatggggttttgccatgtcggccagactggtctcaaactcttgacctcgtgatccccccacctcggcatcccaaagcgctgggattacaggcatgagcctccacacctggccaaacaaaattaaattagatatccatacatcttaaattggatttttaaaaaatgaggtacttacacactgtgcaataatatgcagccacagaaaagaatgaaataatgttttttgcagcagcatgaatgcagaagaagaccattactttaggcaaattaacacagaacaggaaaatatcaacatgttctcatttatacgtgggagctaatcattgcatgtgcatggaaacaaagatggaaaaaataaacactggaaattctaaaaaaggaggaagggagacaaacattaaaaaactatgtatcaggtatgatgtacactacttgggcaatggaattatcaagtccccaaacctcaacatcatgcgctatgttacaggtctgcacctgtaccctctgaatctaacataaaaataatagaaagctctgtgataaaatgatatgtcacatttctccagttctgggttactagttgaaattaggagtgaaaaacagaattatgacccctttcgccataagggtgaatgtttctatgctcggtctccccatattctataaaccaacctctcagaaagctctaaacatatgtcccaagaagtgttgtatttccaagtgtgaaactaaaataaatgactctacatctttatttttaatgttttaactgttcactagactacagagttaatgtattaccctgctttattggggaaaaatgataagtggtttaatcacatttcttctttagaataaaccatttatgaaaatgtgaggctgtggaaatcatgctaaattactgaattggaaagagaaactgtttttgtaaagaacagcatagaagttttatagccatagcccaaatatgatgaaacagagtgtgggatatttaggaccacacagctactaaatgttcacttcatcacgacccttcttgtgaaaaaaggaataacgagtcagcaggtacttttagaatacttttctgattcttctgtagtgttaaattttttgtctttattatatgccatataaaagtctttacttccacaaaagatgccatgagttcaaagttaatatgctcacaaatatattctccctagaagggcactactctgtttgcagtcaaggtgtagcatttttggcctttttttttttttttttttttgctgatatgtttgtgtgaaataggcaggaagtaaagcaaagttaatcataacatttctagattctataactacagcatctgaaatctagcattatgtcaactagaaataatgacaatatttcaaagctgaaaaaataaattgataaatactttatatgtttatttttaatagtttataaaaatttatagtttctaaattataggttaaactagttgaacatgcagatacctaaaagttctatttggatgatagtattaatattttaatattttatgattgtgaatcactactgccttattgggttaactgtaaagcagttatttatcttctaaatgtaaacagagaagaggattttcataatcttaagcatacagatttattaagattagcactttgtttagatttgaataaaatttataggtttttagtaataaaaaatttagcagtttttctagtagaaataaaacagcaatataaatatgtttttaaaaatctgtttaaaagaaactttacatgtgtttgttaaataacatttaaaaccacattgcaagtgactgattagtaattccaatctttattttagtcactgagaaaacttagtatactttaattattcaatagaaaagagtattcttatattagtgttcctgaaactttcagaaactatagaccactcaatagatgatgatgtagatgcagaacacaaatgttctatataatagactcagcatttttttttttttttttttttgagatgaagtctagctctgtcgcccaggctggagtgcagtggcatgatctcggctcactgcaacctctgcctcccaggttcaagagattcccctgcctcagcctcccgagtagctgggattacaggcgcctgccaccacgcccggctaatttttgtacttttagtagagacagggtttcactgtgttggccaggcaggtctcaaacttctgatctcatgatccacccgtctcggcctcctaaagtgctgggattacaagcgtgagccaccgtgcctggcctcatcctagcttttaatataaacattcaaaagtaaaattaatggcctttttttttgagacagagtctcacttatcgccaggctggagtgtagtggtgccatctggactcactgcaacctccgcctcccgtgttcaagcgattctcctgcctcaaactcccaagtagctgggactacaggagcgcgccaccacgcccagctaatttttgtatttttagtagagacggggtttcaccatgttggccaggattgtctcgatctcttgacctcatgattcgcctgcctggacctcccaaagtcctgggattacaggcgtgagccactgcaccgggcccttttattttttattatttatttatttatttatttatttatttatttatttatttatttatttattgagacggagtctggctctgtcgccaggctggaatgatgcagtggtgcgatcttggctcactgcaacctccgccttccgggttcaagcaattctcctgcctcagcctcccgagtaactgggactacaggggcgtgccaccacgcccgcctaattttgtatttttagtagagatggggtttcaccatgtttgtcaggctggtctctaacacctgacctcaggtgatctgcccgcccaggcctcccaaagtactgggattacaggcttgagcccggccaattagtgtctcttttaagtcacgaaagggataacattgttagaatccatttaccaaagtatttgtgttaggcttagtaacaagaactctaaaccaaatatcagggtctacatactatctaagggtgaaaaaaaaaaacccttgttttaaaatttctctttatttctacgaagttagaaaattcaaagctaaaaatcttatgtcaggaataaaaacaagtattgggtgagagggtgttgggcctaatggtgaagattgaaactcattatcagggagttcctgattgcatctcactgatacaaagtgaagaaggtactgaaatagcgaaaaacagtgatataaattgagtacttacatataaaatacaatttttaataaaaagtagcatttaatgtacagctatagatgagaacttttggtcaaatattacctgccttcaatagaaataaaaaaaattattttgtatgtattttctttttttcttttttctttttttcttttttttttttttttttgagacggagtctcactttgtcaccccggctggagtgcagtggcaatctcggctcactgcaacctccgccacctgagttcaatcgattctcccatctcagctgcacaagtagctgggactacaggtgcatgccacagcccagctaacttttgtattttttagtagagacggggtttcaccatgttggccaggctggtctcaagctcctgaccttaagtgatcctcccttctcagcctcccaaagtattgagattatattcttgagccaccgccctcggccataaaaaaaattctttattttaccacaagcattttattattgatgcatatgcttattttgcttaaaatacagtatcttttgatgaaagacttatacttttctttcagtgtgttatttattgctgagaagtggctgtccggctaagaaactgctattctcagcaacaaccacattgactaatagtgaatggaagtgatgtgtggataagaagcaaatgtgtcttctctgcatctcttttttcatccattggctgaagaacgagaaagatgtagagagaaaatgaaagaagatgtaattcctaaaaaatgatgaagtcctcttttggtttttttgtttgttttttggttttcctttttttttttttttttttttttgggacttagtctcgctctgtcacccaggctggagatctcgactcactgcaacctcagcctcccgggttcaagcgattttcctgcctcagcctcgagagtagctgggactacaggctctgtgccaccgagcccagctactttttgtatttttagtaggacagggtttcaccgtgttagctaggatggtctcgatctcctgaccttgtgatctgcctgcctcagcctcccaaagtgctgggattacaggcgtgaaccaccgcgcctgcctttgaagtcctcttaacaacaacaaaaacttacacaggaggccgggagcagtggctcattcctctaattccagcactttgggaggccgaggtgggcagatcacctgaggtcaggggttcgagaccagcctggccaacatggcgaaaccccgtctctactaaaaatacaaaaattagctgggcgtggtggcacgtgtacctgtaatcccagctactcgggaggctgaggcaggagaatcacttgaaacccggaggcagaggttgcagtgagccgagatggtgccattgcactccagcctgggtaacaagagtggaactctgtctcagggaaaaataaactcacaggagatagtgacatgagtagaaaatatactattttgtgaatcatctgaaattgtaatatacaacccaaactgctttaacaaatatattattccttcagttctgactcatcaagatatgattcaattgcctggtgaatcaaagctgagatgataataacttattttacttagcataatgtcctcgaggttcatcaatattgtcgcaaatgacaatactttcttctttttaagggctaaatagcattctgtggtgtaaatataccacattttctatattcattcacctgttgaagaacacttggctcatacaatatcttagctactgtgagtaatcctctttcttctttttttaatttgtttttatatctcttttttctttacttttttaatttctagaagtattttaactttatttatttatttatttagagacgaagtttcgctcttgttgcccaggctggagtacaatagtgctaactttatttatttatttacagacgaagttttgctcttgttgcccaggctggagtgcaatagtgcgatctcagctcaccacaacctccgcctcctgggttcaagcgattctcctgcctcagcctcccaagtagctgggattacaggcatgtgccaccatgcccggctaatttttgtatttttagtagagacagggtttctccatgttggtcaggctggtctcgaactcctgacctcaggtgatccgctcacctcggtcccctaaagtgctgggattacaggcgtgagcaactgagccaggccattttaactttaaaatataaattgtgtcttttgaccaggcccggtggttcacgcctgtaatcccagcactttgggaggccgaggtgggtggatcacctgaggtcgggagctcaacctcccgacctgacacatggagaaaccccgtctctactaaaaatataattagctgggcgtggtgggcgcctgtagtcccagctactcaggaggctgaggcagaagaatcacttaaacccgggaagcagaggtagcgatgagctgagatagcgccattgcactccagcctgggcaacaagagcgaaactcagtgtcaaaaaaaaaagaaaagaaaagaaaagaaaagaaataaagaaacaaataaataaaaactctctgctctgcttaatcagcggtcaccttattttcacacttcaaaggcattttagctgcctgaaaagcagagttacagttcaagtgcgtgtgctgagctggtcctcaacagtgtcagtctattcaaattcacacagatgatcttctggtaaaaatagtgcagttcaacagcattaccacggcaatgtggaacacatgtaataaaataaaagttaggctgggcacggtggctcacgcctgtaatcccagcactttgggaggccgaggtgggcggatcacttgaggtcgggattcaaggccagcctgaccaacatggtgagacccccgtctctactaaaaatacaaaatattagccaggcatggtggcatgtgcctgtaatcccagctactcgggaggctgaggtggaagaatagcttgaacccaggaagtggaggttgcagtgggccaagatcacgccatcacactccagcttgggcgacagagtgagactccgtctcaaaaaaaaaaaaaaaaattctccaccacggatgtgttttttactgtcatcatgagtaaaagatcagtttgagaacaggtaaaatcaaaatgcgcatgctctctacagagaaattttcctactgcagatagctttgcttgaattacctgaaatacaatgtaaatgatggggcttattgagttgacaatatgcagtcaccattacagtcgccatggttgctgcatgctgaggacatggtcactttcttgactacctctcctatctcaataatacttgtctttatttattcctaactaccaactttgagataagattcaactgttacatcatcattgtcaacagtgggaaaatcaatttttttttttttttttgagacagagttgctcttgttgcccaggctggagtgcagtggcacgatctcagctcactgccacctccacctcctgggtttaagcaattatcctgcctcagcctcccgagtagctgggattacaggcatgtgccaccacgtctgtctaattttgtacttttagtatttttagtagagacaaggtttctccatgctggccaggctggtctcaaactcccgacctcaggtgatccgcccacctcagcctcccaaagtgctgggattacaggcgtgagccactgcacctggccgggaaaatcaaaattttaaaatcaaacatatttgagctagctttgggtcattagctgtgtgcccaagagaaattattttacatccttggagcttcaattttcattactagtaaaacattctatttttcacagggctgctttaattcacacctggtagctacaagtcttttcactgaaagtcttttttatatatgtatattaaatatttaacaataaaaataaaattattcatatttaaagatattctaattgagtgggtatattttgtcatatttaatgtatttatcctttctaaaaaataccaaaataagaattttattatttttcctggaataacatattaagggtgtctacattgtgactttgctcatttttgcatatggttttgactgctgctgttgaatttaggctgaattttaaacccactgttgtctagcttgtgtgattttagttcatttggggaaccaaatatattagacatggattgtttggggtaacttggcttcatttctactgtctttctgttattacatctgaagatttagaaatgactaggattcaaataaggttgatttggaatcaggcacagaaaatcccagaaaagactgtggaaaatagttacttgatagtgcctttcagtgagatttatacatgaaacagagttcaataaaattattgcaagtttgttaaatttcaaatctaattgcctgtaacatattaggcgcttgtcttagtttgtctatggcatcgtagcttggagaagctgacattacagaaaggatattgctacattaataagattaggaacaaatactaatgtgcttgtaaacatttgccttaatattctttagatacatgccactctggctcaattcttttggtacaactgtttatgattccagagactcctttccaccaaattcaagtcacggtgttttcagcttcttatgtttatttttacccagtaatcttcatagttgacattatgatgttggaatcccccaggcaatccctgagccttacagcgaccatcctaccttatccgtcttgtttcacattctctgttgttgagtccctctcaccccatattggagctttaatgaggcctcaatggtttggaggaaacagtggaatggattgccatatatgttgagttgagaacaagggtcctcttgaggataaacactttacatttattattcatagtacaaagcagtatttttaagatgtgaacatgtttcactcaaattaaatatgaatgatttatcagtatgacaatatagtaaaattaactgcatcaagttcaccaaatgtttcgctttggactctccaaacacaaagattcatatgtatgcattggtggatgttagctttttttggtgtaagtttttgtttgttttcatttttaaagatttttgcctactttatagctcatgttaagctacagaaagcttacgaaaagctttattttatcaatttttttaaccaaatgtttaaatattgaaagtgacattttggattactacttttcactgatgtagtttgcatttattagtacatttcagtttttccttatgtggtgtaaggttttaaaaattccttccaggccgggtgcggtggctcacgcctttgatccccgcagtttgggaggcggaggcgggcgggtaaactaaggtcaggagttgaagaccagcctggccaacatggtgaaaccccgtctctattaaaaacataaaaattagcccggcgcggtggcgcgcgtctgtagtcagagctactcgggaggttaagacaggagaaccacttgaacccaggaggtggaagtttcagtgagccgagattgcgccactgcactccagcctagcgacagagcgagactctgtctcaaaaaaaaaaaaaaaaaaaaaagccgggcatgatggtgggtggctgtagtgccagctattcgggaggctgaggcaggagaatcacttgaacccgggaagtggaggttgcaatgagccaagatcgggccactgcactcctgcctggcaacagagcgagattcagtctcaggaaaaaaaaaaaaaaatccttccagttgattgtttaggtaacagcaaaatctgttttcttagacagcagcataagaattattgatatgccacctttagaggtactggaagcaactggataaatgtgctgaaatctgcatttatttataggctcattagaggctaagtcatagcaacatatgttagttccattcaatttttttttgtctaaattttgtcgagccacatccatctgtatatataactctatcttggtaacagcttttttattctaagccagaacttgttttaactggtggcttcattttaaatgtgtcagctgtattataacacattcgaataagtaatagaaattttattcaaaaaatatggatagaaaagtcatacaggcacactgaaaataaattggaatctagcacgtgacactaattaacaggtggagcatattagactagactaaaatccctgtaaacaataccgaaagacagaattttttaattaaaaacatcttcaggcaggcgtggtggctcacgcctgtaatctcagcactttgggaggctgtggcaggtggatcacctgaggtcaggagttcagaccagcctggccaacatggaaaaaccccgtttctactaaaaatacaaaaaaaattagcccggcgtggtggtaggcacctgtaatcccagctacttgggaggctgaggcaggagaatcgcttgaacctgggaggcagagattgcagtgagctaagatcgcaccattgcactccagccggggcaacaagagggaaactccgtctaaaaaaaaaaaaaaaattcaacaatttaataggcctatgagatatttataaaattgatttgtttacccatcatcaatcaatatcaatttaaactagaaaattttaaacacatcatacaaaaaatataattactcaactatcccctgacttaatctgattaaagcaagacttctggatatttcaaaatgctaaattattggtgaaaaatattcatcttgaacagctcttttatatatatattactactaagtaaaacctaatactgataggtatgatttatgaaatgtttgtgaatgtctatcacagtagtcagaaaatcaaaaaattattttaatctgctgtctaaataattttgatttaaatatttggtattttaattgagtggcagcatatatgtgtgtgtatatatatatatacactaatcaccatttctttactattttgccattttataaaataagcctgaatttgtggagacatttttttaaaatcctatcttttattaaaaaaaaaaaaatttaggccaggagcagtggctcatgcctgtaatcccagcactttgggaggctgaggcaggtagatcacctgaggtcaggagtttgagaccagcctgactaacctggtgaaacccagtgtctactaaatacaaaaaattagtgggcatggtggtgcatgcctgtaatcccagctactagggtggctgaggcaggagaatcacttgaacctggggaagcggaggttgcagtgagccaatattgcaccattgcactccagcctaggcaacaagagcgaagctccatctcaagaaaaaaaaaaaaaaaagactcagacatcaaaaagtaaatatactaaagtcataatattacatagtttgctaaacgctacagtaatttgtaaagtttgtttatgcataccaatcttagattatctaaaacataataaagtttcttttttatgttatattaaacatacaaaagtccaaaatatatccagacacacaagagctgtggctggcattttaagaaacaaataatttagcactatacactgttctgtatatatacagatgaaaaacaaaaccttgaagttttcaaatcataaacagaaatattatttgtgagtctgaacctcaaatatataatactaatacatacagtttactctggctctaatacttagaccctttttatctatgggttccaccttcatggaatcagccaaccatgtctggaaaatatttgggaagaaattcccacaaagtacccaaaagcaaaacttaaaacctcaccaagtactatgttgcacttatgctaatgaagtaatgcataggtattatattaggtattataaattaatattaggtattataaataatttagagataatttaaagtatatagtcggatgtacataggttatgtgcaagcactacactattttatatcagaaacttgagactccttggattttggtatccatggaggagagtagggttggtcctgaaaccaatcccccttgaataccaaggggcgactgtacttctagacatccatgtaataatacgtctctgttggcatgatgtaaggatccagtgggatcatttaggttaagtaagcactgggcctggcacatgagaagtcttcactacatgttacctacggcttcatggcttccttctttttttttttttttttttgagacagtgtcttgctctatcgcccagactggagtgcagtggtgtgatctcagcttactgcaacctctgcctcccaggctcaagcaattcttgtgcctcaccctcttgagtagctgggactacaggggtgcatgcctggctaatttttgtatttttagtagagatggtgttttgctatgttggccaggctggttttgaactcctgacctcaagtggctgcttgccttggcctcccaaagtactgggattgcaaaagtgagccattgtgcccggcccagtttactctttttaatttaaaatatactgtacttttgtgttggatcatcatggaggacaggaggcaggactagattgcatctccagacagagcagcttgctgaagcttgcatcgtgaattttagctccatatctactgcaagaacaagccagaaatcccaagaggacccacagaccctctgaagaaaatggactgctcctgcaggatccaggagactctccaaatactgtgagtgtccaaactgtagaagtaggaaagggagattctcctctcctgaacacacacccccactggagaagctaaaggtctgtttataggagaagtttctgaatttacatggaactgagtcaatttagatagccaagcgaaatataggggtagaggaagcagcagaaaggcctgggagctcactgaatcccctagtgggccatttttgtctggcaccaaagggatccatcaggagggtgaccagaggagcaggaggtaaaactccacagggagaaggaaatctctagctgaactttgtgacaatttgaatggggcaagaagcttctctcctgtatccacagctgagaagccctctgtgggtagggcacaaatctggtgtgcagatttcacaggtgggggaagaaccaagcccctttctttcacatttgggaggtggttagctgggggcaagttttcaagcccatcacaccctctgcctggaagaaggctcggggctgttgcagggtacatggtaggagggagaccagctctttggtttgtgtgggagctggctggggcctgtgactgtcagccttccccaacttccctaacaacatacatgactcagcagaggcagccataatcctcctaggtacacaactccagtgacctgggaatctcacccccataccccacagcagccacagcaagacctgcccaagaggagtctgaactcaggcacacctatccccgcccccacctgatggtccttttctatctaccctggtagcaaaagtcaaaggacatataatcttgggagttctagggctccgcctacttccggtccccctctatattactacagctgatgcttttctggaaagcaccacctcctggcaggagacaaaccagcacaaaactagagcattaaaccaccaaaactgaaaaccttcacagagtctattgcaccccgctgccacctgcactagaacaggtgctggtatccacagctgagaagcctatagatggttcacatcacaggactctgtgcagacaactccagtaccagcgcagagtcacatagacttgctgggtggctagacccagaagagagacaaaaatctctgcattttggcacgtagggagtcacatccataggaaaaggggaagagtactacaacacccagtgggacaaaagaactgaaaacagccttcagccctggactttccctctgacagagcctaccaaaatgagaagtcagaaaacaaacccttgtaatatggcaaaacaaggctctttaacaccccccaaaaaatcacactagttcaccagcaatggattcaaaccaagaagaaatccctaatttacctgaagaataactcaggaggttaattattaagctaatcagggagaggtcagagaaaggtgaagcccaatgcaagaaaatccaaaaaaaatcatacaagaagtaaagggaggaatattcaaggaaattgatagctgaaagaaaaaacaataaaaaattcaggaaactttggacacaattttagaaatgtgaaatgctctgaaaagtctccacaatagaattgaacaagtagaagaaaaattcagggctctaagacaaggtctttgaattaactcaatccaacaaagacaaaaataaataaataaataagaataagaaaatatgaacaaagtctccaagaagtctggaattatgttaaatgaccaaacaagaataatcagtgctgctgaagaagaagagaaacctaaaagtttggaaaacatatttaggggaataattgagaaaagctttcctggccttgctagagacctagacatccaaatgcaagaagcacaaagaacacctgggaaattcatctcaaaaagattgttgcttaggcacattttcatcaggttatctaatgttaagatgaaggaaagaatattaagagctgtgagacaaaagcaccaggtaacctataaaacaaaacctatcagattaacagcagatttctcagtagaaactctacaagcgagaagggattgaggatctatcttcagccttctcgaacaaagcaattatcagccaagaattttgtatccagcaaaattaagcttcacatatgaagaaaagataataattttcagacaaacaaatgctgaatttgccattatcaagtcaccactacaaaacagctaaaagagagctaaatcttgaaacaaattctgaaaacatatcaaaacagaacctctttaaagcgtaaatctcacaggacctaaaaaacaaaaatacaatttaaaaaacaaaaacaaacaaagtatacagacaacaaatagcatgatgaatggaatggtgcctcacatctcaatactaacactgaatgtaaatagactaaatgctctacttaaatgacacagaattgcagaatgaataagcattccccaaccaaccatctgctgccttcaagagactcacctaacacataaggactcgcaaaaacttaaggtaaagtggtggaaaaacatttcatgcaaatggacaccaaaagcaagcaggagtagctactcttaaatcagacaaaacaaactttaaggcaacagcagttaaaaaagacaaaggacattatataatgataaaaagccttgtccagcaggaaaatatcacaattctatacatatatgcacctaacagtggagatcccaaattgataaaacaattactaatagacctaagaaatgagatagacagcaacacaataatagtgggagattttaattctccactgacagcactagaaaggtcacctgggtgtggtggctcatgcctgtaatcccagcactttgggaggctaaggcaggcagatcagctgaggtcaggagttcaagaccagcctgatcaagatgatgaaaccctgtctctacaaaagtaaaaaaattagctgggcatgatagcaggtaccggtaatcccagctacttgggaggctgaggtgagagaatcacttgaacttgggaggtggaggttgcagtgagccaagatcatgccattgcactctagcctgggtgagagagcagatttcatctaagaaaaaaaaaagtcatcaagacagtatacaaagaaacaatgtactgaaactatacacgggaacaaatgtatctctctctctctctctctctatatatatatatagatatatagatatagatatagatatatagatatatctacctgtgtcgaggcatagtgttacacactttatttcaattatttaatttgattttaacaatgagatggataatatcctgctcattttacagatgagacaattgagccttaaaggttaaacaaatgatttcctaagctcattcagccaataaacggtaggggactgcttgactccagcccagttgatcctcaaatccatgatttctgccaccatattcacagaaacaagacaagctgaaagtatagcctgactcttgaaacagtcaaagaattgtgtacgtttatgaaagatatagatatatagatatctatatatctatctatatacagatagatatctatatatctatctatatacagatagatatctatatatctatctatatacagatagatatctatatatctatctatatacagatagatatatatatagagagagaacatttcatccaacaaccacagaatatacattctattcaaaagtgcatggaactttcaccaagacagaccatatgacaggccacataatgagcctcgataaatttaagaaaattaaaattctatcaagcactctctcagaccacagcggaataaaactggaaatcaactccaaaaggaacccccaaaatcacgcaaatacatggaaattgaataacctgctcctgaatgattattgggtcaaaaatgaaattaagaggaaaattataaaattcttctaactgaatgaaaaaggggacaaaatctatcaaaacctccaggacacagctaaggtggtgcaaagaggaatgcttatagccctaaatgcctacatcaaagtctgaaagagcacagacaatctaaggtcgcatctcaaggaaataaaggaacaaaaacaaaccaaacccaaacctagcagaagaaaggaaataaccaatatcagagcagaattaaataaagttgaaacaaagaaaacaacacaaaaaataaatttaacaaaaagctggttctttgaaaagataaagaaaactgatagaccattagcaagattaaccaaaaaaataagagagaaaagccaaataagctcaacaaggaatgaaacaagatacaactgacaccccagaaatacaaaagatcattcaaggctactatgaacacttttatgtgcataaactagaaaacctgtaagagatggataaattcctggaaagatacaaccctcctagcttaaatcaggaagaattagatatcctgaacaaaccaataacaagcaacaagattgaaatgataattaaaaaattacaaacaaaaaaaagtccaggaccagacagattcacagcagaattctaccagatatacaaagaagagttggtaccaatcctattgacactatttcacaagatggagagagagaaaacccttccttgggttttccttcattctatgaacccagtatcattttaatgccaaaaccaggaaaggatataaccaaaaacaaacaaacaaaaaactacagaccaatatccctgatgaaaatagatgctaaaatccttaacaaaatactagctaaccgaatctgacaacatatcaacaaagcatgatcaagtgggtttcataccagggatgcagggttggtttaacattgcaagtcaataaatgtgatataccacctaaacagaattaaaaacaaaaaacacatgatcatctcaatagatgcagaaaaaacatttgacaaaatccagcattgctttatgattaaaactctcagcaaaataggcatacaaggaacatacctcaatgtaataaaagccatctatgacaaacccacagccaacataatactgcatgtggaagagttgaaaccattttctctgagaactgtaacaagacaaggatgcccactctcaccactcctcttcaacatagtactggaagtcctagccagagcaatcaaacaagagaaataaagagcatccaaatcagtaaagaggaaggtcaaactgtcactgtttgctgatgatataattgtttacttagaaaaccctaaagactcctccagaaagcttctagaactgataaaagaattcagcaaagtttccagacacaaaattaatgtacacaaattagtagctcttctgtataccaacagtgaccaagctgagaatcagatcaggaactcaaccccttttacgatagctgcaaaaaaaattaaatgcttaggaatatgtctaaccaaggaggtgaaagctttctacaaagaaaactacaaaacactgctgaaagaaatcatagacaacacaaacaaatagaattacctcccatgctcagggatgggtagaatcaatattgtgaaaatgaccatactgtcaaaagcaatctacaaattcaatgcaattcccatccaaataccactatgattcttcagagttagaaaaaacaattctaaacttcatattaaactgaaaaacagctcatatagccaaagcaagactaactaaaaagaacaaatctggaggcatcacattacctgatttcaaactgtactataagacgatagtcaccaaaacagcatggtactggtataaaaataggcacatagaccaatggaacaaaatagagaacccagagataaacccaaatacttacagccaactgatcatcaacaaaacaaacaaaaacattatatggggaaaggatacccttttcaacaaattgtgctgggataattggctagtcacatgtaggaaaataaaactggatcctcacctcgcctctcaccttatacaaaaatcagctcaagatggattaaggacttaaatctaagacttgaaactagaacattgaaaaaaacccttctagacattggcttaggcaggacttcatgaccaagaacccaaaagcaaatgcaataaaacaaagataaattgctgggacttaattaaactaaagagcctttgcatggcaaaagtaaagtcagcagagtaaacagaaaacccacagagtgggaaaaatctttacaatctacacatctgacaaagaactaatatccaaaatctacaaagaactcaaaaaaagcaacaagaataaaaaagaaacaatccttccaaaaagtaggctaaggacatgaatacacaattataaaaagaagacatataaatggctaacaaacatatggaaaaaatgctcaacatcactaatgatcaggaaaatgcaaatcaaaaccacaatgtgataccaacttactcctgcaagaatggccgtaatcaagaaatcaaaaaatagtagatgttggcatggattcaatgaacaaagaacacttctgtactgtgggtgggaatgtaaactagtacaaccactatggaaatcagggtggagattccttaaataactaaaagtagaactaccatttgatccagcaattccataactgggtacccagaaaaaaagaagtcattatgtgaaaaagatacctgcacatgcatgtttatagcagtacaattcacaattgcaaaatcgtgcccaaatgcccatcaattgagtggattaagaaactgtggtatacgtataggatgggaatactatccaagccttaaaaaggaatgaacgaatggcattctcagcgacctggttgagattggagactattattctaagtgaagtaactcaggaatggaaaaccaaacatcatatgttctcactaataagtggaagctgtgttgtaaggatgcaaagacataaaaataatataatggactttggggatacagggagaaagggtagaaagggggtgagggataaaagactacaaatagggtccagtgtatactgctcaggtgatgggtgcaccagactctcacaaatcaccactaaagaacttacttatgtaaccaaacaccacctgttccccaataacctttggaaataaaaacaatttttaaaaaatgtcactctcagcacatgcagtttcagctttgcttcagagacctgaattactttgattcgtggtccagctaaaattaaattaaattaaattttaaaatgtcaacgttttcaaaggaagtacaataagcctgaaaatattttagataaaaatatttttgtaaatttgacaggttaaggccgggcgcggtggctcacgcctgtaatcccagcactttgggaagccgaggcgaacggatcacgaggtcgggagatcgagatcatcctggctaacatggtgaaaccccgtctctactaaaaatacaaaaaaaagaaaaaaaaaaaatagccgggcatggcagtaggcgcctatagtcctagttactcgggaggctgaggcaggagaatggcatgaacctgggaggctgagcttgcagtgagccgagattgcaccactgcactccagcctgggcgacagagcgagactccatctcaaaaataaaaaaataaaaaattacgggttaatgtggtataagactaaactaattagtagagtacatttgaaacacttcagattacaaatatttagtcctttttaggatacagttttaaaaattaatcactatttttatgaataaaagacttttttttgaattgtaaaattttattttccacacgtcaacattcttattaacacagcttgattgaaaaaattctgaccataagcatgttgattatttccctttggaactggtgaaatcagaaaaataaaatatttattttgcatatatagcatcaaaactattcactcaatgtggccttctgtgtgtatattaaaaggctttcttctggccgggcgcggtggctcacgcctgtaatcctagcactttgggaggctgaggcggggggatcacctgaggtcgggagtttgagaccagccttactaacatggagaaatcctgtctctactaaaaatacaaaattagccgggcgtggtggcacatgcctgtaatcccagctactcgaggaggctgaggcaggagaattgcttgaacccgggaggaagacggagtatttattaaaaagagagaaaagggattgattacagatgttagttgcagatataacttattgtgattggaactaaatgttaccaaaaaatttaggttgtatgtgaaattcttcgataaattttatggacttcaataggtcacagaaaatcttactgtgctcttctttcttttacaacacaaagttggccgggcgcggtggttcacgcctgtaatcccagcacttcggaaggctgaggtgggtggatcactgtcattatttctagctgacataaggtaacaatttacaagctgtggctgtagaaactggaaatctcctggttgactctgctttacttcttgccttcctattttagagaaacaaagcaccacaagaaaggccagaaaggacacaccttgattgcaaacacactggcgtctttctagggagaatatatgggtgacaatattaatttgaaatttatggcatcttttgtagaagtacggacatctatatggcaaataataaatacaagtaaaaatttaacactgcgatagaatcaggaaagtttgccaaaaataccttgtgatcaattattcctttattcactagtatggttgtgatggaatggttgcagcagtgtggtcttaaatagccaacactctctttcatcatccttgcgctatggccattttttttttttttttttttttttgagacggagtctcactctgttgcccaggctgaagtgcactggcatgatctcagctcactgcaacttctgcctcctgggttcaagcgattctcctgcctcagcctcctgagtagctgggactacaggtgtgggccaccacgcccagctaacttttatctttttagtagagacagggtttcaccatgttggccaggatggtctccatctcttgacgtcatgatctgcccgcctcggccttccaaagtgctagaattacaggcataagccactgcacccggccgcttttttcttcagaaaaatactttattttcctaattcagaaatttaacgtaattttcagtctcacattttcaaaaatggtttattctaaaagaagtatgattaaacaattcagcatttttttccaaaaaaaaaaagagtaaaaagttaactttatagtctagtgtagttactaagtaaaaaacaaagatgtagagtcatttattttagctgcacacttggaaataaaacacttctttgcctataggctgagagctttcaaagatgctagcttacagaatgtgggaagacctagtattaaaacattcactcctatgctcaaagggaacataattttgtgtcttctttgactcctaattccaactattaacccagatctatagaaatgtaacatttcattatagcacaaaatattttattatttttatttcagattcaagagatataggtgaagatgtgtaacacaggtatactacatgatgttaaggtttgggcacttgataactccattgccccagtagtgtacatcatacttgataggtagtttttcaatgtttctctcctttccttttttatttttagaactctgcgttgattgttttcatctatgtttccatgttaacccaatgtttagcacccactcataagtgagaacatgtggtatataacatacttatacacaatgcaatactatccagccacagaaaaagaaatagtgtttttttgcagcaacatgaatgcatcagaagtaatgttctttgcagcaatatggatgttaattttctcattataagcaaattaaaaaagaaaatgaatctaaaggccgggcgtggtagctcacgcctgtaatcccaacactttgggagaccgaggtgggcggatcacgaggtcaagagatcgagaccatcctggccaacatggtgaaaccccatctctactaaaaatacaaaaattagctgggcgtggtggtgcatgcctgtagtcccagatacttgggaggctgaggaaggagaatcgcttgaacatgggaggtggaggttgcagtgagctgagatcgcgccactgcactccagcctggtgacagagggagactccatctcaaaaaaaaaagaaagaaagaaaagaaaaagaaaagaaaaaggacaccacatattctcactcataggtgggaattgaacaatgagaacacatggacacaggaaggggaacatcacactctggggactgttgtggggtggggggaggggggaggtatagcattgggagatatacctaatgctagatgatgggttagcgggtgcagcacaccagcatggcacatgtatacgtatgtaactaacctgcacattgtgcacatgtaccctaaaacttaaagtataataataataaattaaaaaaaaaagaaaagaaaaaggaaattaatctaaaattcattagtacctggttaaattgtagatctttgctatggtgaatagtgctgcagtaaacatttcagtgcaagtcttttttctaaaattattttcccttttgggtatatactcagtaattgggttgatgggctaaatggcaattctattttaagttctttgaaaaatcttcaaactgtgttccatagaggctgaattaatttgcatttccatcaacagtgtagaaagacgccctttttttccacaacttgaatatttgtcactttttggcttttaataagtcattctaactagcatgagatagtatcacattgttattttgacttacatttctctgatgactagggacgttgagcatttttctttgtatgtttattggcagcttttatgtctttctttgagtaatggcttttcatattatgtgtctttttttataaaatttctgatagattctatatattaatactttgttgtatgtagtttgcaaatattttattttatactacaggttgtctaatttgtcaatagtttcttttgctatgcagctatttagtttaattaggtgcgaatttccaagttttttccattgaatttacttttaaggtgttatgaattatttccagagggcagtgtctagaagagtactttctaattggtcttctagaatttttatatattaaagtctcacagttattaatctatcttgttttatatatgagaggtagggtttcagttttcttcttttgcatatgactaaccagttttcccaatactatttattagataggtagttatttcctttttatttctattaactttgtcaaaaataagttgggggaaggagtggtggctcctgcctgtaatcccagcacttcagggaccaaggtgagcagatcacttgagttcaagtgtttgagaccagcctggccaacatggtgaaaccccacctctactgaaaatacaaaagttggccaggcgtggtggtgcatatctgtaatcacagctactcgggaggctgaggcatgagaattgcttgaactcaggagtcagaggttgcagtgatctgggattgttccacagcactccctcaaaaaaaaaaaaaaaaaggttcgttgtgtacgagtgtagctttatttcagggctctctctctgttccattggtccatatgtatatttttgtaccagaaccatgtcatattggttactgtagcttctggtaaagtttgaagtcaggtaatgtgaggcatccaggtttgttaacgttgccttggctatttaggcttgtttttctacacattttagaagattttttttaattctataaaaatggcattaagggtttgatagaaatagcacttaatttgtaggtggttttaggcagcacaaacatttaaattatattgattcttcaaatccatgagcataaaatgcttttccatttacttgtgttttctgatttctttcagcagtgtattgttgtactccttgtagagagattttacatccttgattcaatgtatatatattttttgtttgtggctatcataaactgtgttcttgattttgttctcagcttgaatgttattagtgtaaaaaatgctactcatttttgtatgttgattttgtatcatgagacattgctgaagtcattttttaggcttacgagtcttttggttaaatatttaaagtttcccaggtagagaattatatcttctgtgaagataatttgacttcctatttttctctttagatgccttttatttatttgtttgattgcactggctaggacttccagaactatgttgaataggagtgtgagtgttgagtgaatattgttatttttatggagaatgcatctagctttcatctgttaagtatgatgttaaatgaagatttgtcatggatgactcattattttgaggtgtttcttcaatgtctagtttgttgagaatatttttatgaatattgaattttcttgaatgctttttctgcatgttttgataattacataatttttgcttttaatcattttacaaggtgaatttcacttattgactgcatatcataaaacattcttgcattcataaagcccgcatgattgtggaaaataactttttgatttgcttgtgaactcagcttgctagtgtttcatggaagatgtttcaatgttcatgaagaatatttgcctatagtttttttgtgtcttcactagattttggtattaggatgatacttgtttcatataatgaattaggaataaattccactttgattttttatatacattcagtagaattagtaccagttcatcctttttttttttttttgacggagtcttgctctgttgcccaggctggagtgtagtggtgcgatctcagctcactgcaacctatccgtaccgggctcaagcaattctcctgtctcagcctcctgggtagctgggactacaggcacccactaccaacacacttgactaatttttgtatttttagtagagacagggtttcaccatattggccagggtggtcttgaactcctgcccttgtgatccgcccacctcagcctcccagagtgttgagattaacaagcgtgagccaccgtgcccggcctagttcatttttttttgtttgtttgaggcagagtctcgctttgtcgcccaggctggagtgcagtggcatgcatgatcttggctcactgcaacctccacctcctgtgttaaagtgattctcctacctcagcctcccgagtagctgggattacaggcacacgccaccatgcccagttaatttttgtatttttgataaagacagggtttcaccatgttgcccaggctggtctcgaactcctgacctcaggtgatccacacccttcggtctcccaaagtgctgggattacaggcatgagccaccatgcccggcccatcttttttatatgtggtaaaatttggctgtgaatttatctgattcagggctatttatgtttttttattactaattcaatttcattatacatttttgctctgttctagatttttgtttcttcatggctcaattttggaagattgtgtgtatccagtttattttctctaaattttttagtttccatgcatagagatgtccatagtagtctctgaggatgttttatatttatgtgggattagctttcacatgtttaacatttaaatacatgcagaataaaagttggacaaaagtcatattccctcatgataaatatgtgaataaattaggtatagggcaaatgcaccttaagccaataaatgccacatataacaaaaattgcacagctaacaacatagtagatggagaaatgttgtgagcttttactctaagagctagaataacacaaggatgcacactttcttcagtcttactaaacagagtactaaatgttcatggcagagaaattagaaaataaaatcaaaggcatccatattggaaaaaaattaaattattgctgcttgcagatgacatcttaagtatagaaaagcctaagactttactgagaaccactagaataaacaaatttattaaactggcagaatataaaatcaacatacaaaattagtagcatttctatacactaatgattaactatctgaaaatgaaattaaaaaccaatcccatctacaataactgtagttactagactttgaattaaatttaactaaaaagttgaaacatgttacattataggataaagaaccttaaagaaattaaataatacacaaatgaaaaaattacacatatttgcaaaaaactatcaaagtaccagtgacacactaaatagaaaattttaaatatatatctaaaattttatatatatatatatctaaaatttatatggtaccacaaaatacctgaatagccaaaacaaccaagaaaaaaaagactgaaattatcacccaaactgacttagaaatatactacaaagctatagtaatcaaaatggtatggtacttgaataaaaataaacacatacacaaatgaagcagaaaagagcagaaacatattcatgtatttatagctaaatgattttagaaataggtgacagtttcttagggaaaggacagtatcttcagtaaatggtgttgagaaaactatatagccacatgaagagcaataaaacaagatctgcatatcacatcatatatataaatcaactcaaaataaattagatacttaactgtaaggttgaaactggaattactacaaaaaaatatagggtgaaagccctataacattgatctggacagtgacttttttgttgtaatctcaaaaccccaggaaaataagggaaaaacagataagtcatattacttcaaattaaaaagttgctgcacacaattctcatacaattaacaggattagacaactgaagaatcagagaaaatataggcaaatcatacatgagacaagcgttttgttgtatactaaaattactacaccaaaaaaaaacttaaaaatgagcaaaaggtttgaatatttttcaagacatacatattgccaagctataaataaaaaatgctcaatatcaattatcagaaaaggaaagcaaaaaaaattactatgagatatcaactcactcctgttagtatgactcttattaaaaagtgttagtaaagctgtgcagaaaagggaatgcttgcacactgttgggtgaatataaatgggacagccattatgaaaaacaaaatagagatatctcaaaaaatttaaaatcaaactatcaaatgcagaaagtgcaatattggatacatatccaaaacaaaatcggaatgaagaaacatttgcaactctatgttgttcgcaacactcttcacaatggccaaaacataaaatcagtggttcaacatctaattagcatataaagacaatgtggtgtatatacacaacaaaatactattcatctttaaaaaagaaaatgtagttttcaattacatgattaatctggaggacattagttgaagtaaggcatagatattattactttataatttcacttaaagatggattctaaaaaacttaatctcattgaagtagagagtaacatagtgaccaccagatgccaaggtattcagaaagtgaagcttgaaaataaatctgtcaaacaatacataattatagttgggcaggagaaataagttcaaacaatatgttctacagcatagtgactatagttcataataatgtatttgcatttttttaaaaaattaagacaatatcatgtgctctcaccacaaagagttaactatgtgaagcattacctaaaattgagcatttgacaatgtacatagacttcaaaatgtaatgttttacaaaataaatacacatttatttattacagatgataatggtatgaaagacactaaaagggcaggtgttcgggctgggcacagtggctcacgcctgtaatcccagcactttgggaggctgacgtgggcaaatcatgaggtcaagagattgagaccatcctggccaacatggtgaaatcccgcctctactaaaaagacaaaaaacttagctgggtgtggtggtacatgcctatagtcccagccacttgggaggctgaggcaggagaattacttgaactagggaggtggaggttgcagcgagccgagatcgtgccactgcactccagcctggtgatagagcaagactccgtctcaaaaaaaaacaaaacaaaaaaacttacattgataagcaaactctccagttaaaatcaatttttctttctttttttgagacagtctcgccttgtcacctaggctggagtgcaatggtgcaatctcggctcactgctacctctgcctcctgggttcaagcaattcttctgcctcagcctccggagtagctgggattacaggtgcatgccaccccacctggctattttgtatctttagtagagacagggtttcaccatattggctaggctggtctcaaactcctgacctcatgatctgcccgcctcggcctcccaacgtgctgggattacaggtgtgagccatcgcacttgaccaaaaaacaatttttcaagtgcattaaaaataccaactttctcatcaaaacctacaaagtagcatgtgaaatgacatggcattacaaaagtgagaaaattgtagctataaaacagaaaaaaagaagtgctgtgatgtcatgcaaagttggaaaacacgtaagacaaacctgaagataaatggaaaataaaacaagcagaattttgctttatattcagcaagattcaggtttgctgcctaaaaaaagatcctatccacataaagaatcaatgttttttctttgtcatttatattttacatctctgacttaaagttacaaaataactctagcaggaatatttacagattataaaacatctgttactcggcaagcactgtcacgtttttttgctacatttatatattaaaacatcctcatgacttatgaagcctccttagtacttacctgaatgttatgggaagtcagggaccctgaacagagggaccggctggagccgtgggagaggaacataaattgttaagatttcatcttaatatggacatttatcagttctcaaataatacttttgtaatttcttatgccggtctttaatctcttaatcctgttatcttcataaactgaggatgtacatcacctcaggaccactgtgataattaactgtacagattgattgtaaaacgtgtgcttgaaaaatatgaaatcagtgcaccttgaaaaagaacagaatagcgacttttatggaacaagggaagacaaccataaggtctgactgcctgcggggtcgggcaaagagccatatttttctttttgcagagggcctataaatggacgtgcaagtaggaaatatatcaccaaattcttttcctagcaagtaatattaatactctgggaaaagaatgcattcctgggggaggtctataaatggctgctctgggaatgtctgtcttgtacagttcagataaggactgagataagccatggtctcctgcagaaccctcaggcttactagggttgggaaaactcaaccctggtaaatttgtggtcagactggttctctgctctccaaccgttttcagttgtttatcaagacaatacatgtactactgaacatacacccttatcagtggttctgcttttgccctttgccctgtgatctttgttggacccttatcagaggttctgcttttgccctttgatctttgttggagccttattagtggttctgcgtttgccctttgccctgttccctcagaaacgtgatctttgttagacccttatcagtggttctgctttttgctctttgaagcatgtgatctttgtacctactctctgttcttacaccccctccccttttgaaacccttaataaaaacttgctggtctgagactcaggcgggcatcatggtcctactgataggtgatgtcacccctggcagcccagctgtaaaattcctttctctgtgttatctctatttctcagccggctgacacttatggaaaatagaaagaacctacattgaaatattgggggcgggttcccccaatacctgaactggctcaatcaacaaataaatttacttctgtcaattataaaaagtgaaaggaataataacttaaataggcttatataaggttcttcaattagaagaacaaaatagaatgttttaattcaataaaacaatacactaattgtggaactacatctaaaaattattttgtgtgccctactaaattttataaaaatagtttatatctttgaccacttcacataatgaaaacctcataaactataaaagaaaaaaaattgtaagaaacaacaaaaaaatgtgggctaggcatgagtaccaatcaagtaaaaacaaaatttgcataagattttgaacccataagccatactattttacagtaattcagtagaaagagtatagatttgctttccgcatttttgaggtttatagttttctagtaaattagttaccttactaaaatgttttgttccaatattgctcttttcttctgaaaataggaacaaatttatactcacacaaacatgcttacttactccataattttcttacacctagggtttaacttaagagtaatgtatgtatatatttaactttactaagtcaaaactaacaagtctgtatgtgtttgcaggcagagaaacaacatgttcaaaaatacatataacaatttttttaatgcttatttaggactcagaatgtgtggactttatttatacttctatataatttttagcataaccataaaaatagccctgtagtcaataacaattgtacattaaaaaaaactaaaactgtagaattggtttataatacaaaggataaatgctggagatgatggatacttaatttttcctgatgtaattattacatattatatgtctgtatcaaaatgtgctatatatggcataaatatacacatacaatgtatccacaaaaattaaaaagtataaacttagatgagaaataaatatttaacctatgagaacattctttaacctccttgcagtttaaagtcactggcaaaagggattactagaaatgtttgtccattatgttaccaaatagtatgttaccatcttttgcctacaccagtgagtaaagtgaaataggttaaagttaatggcatactaactttattaaatgttttataaatgttaaataaaattttaataaaatattaagttcacacataacttaaaattttaagaacgtacattttattacataaaagtacaattagtaaaataatttactaattttaactaaaatttaaaatgcttttttctcactataatgcagaatattaccctgaacacccacctcatgtgtcacttatattaacaaaaagagcctctccacttagatttttatgtgtcttacattttaatgtccttacccttccataaaaaagatcataatgcccaactaataaaaaaaaattctcctatctctgatgcaacaattagtcacaagttgaatacaatagaaatgaagaaaacaagaagagttttgaattttgagagttgaattacattattcatgttgcaaataatctgtattttttaaggaaaaaagtatactttcaatgtaattataacttttcaaaaaattttctacaccttttaaagttatacacaatttatctaacaactttagttctggattattttttatactcagcattctgatttactgtaatgtctgaagtgtcagtgccttagatatttctgagctatctgatatttacatagacttaattttagaataaatattgttttatatttactgcatctacaaaaaaaaaaaaaaaaatatatatatatatatatatatatatatatatatagagagagagagagagagagagagagagagagagagagagagagagagagagagagagatggagtttcacacttgttgcccaggctagagtgcaatggcacgatcttgactcactgcaacctctgcccctccagttcaagcgattctcctgcctcagcctcctgagtagctggaattaaaggcactcaccaccatgccttgctaatttttgtatttttagtagagacagggtttcgctatgttgaccaggctggtctcgaacacctgacctcaggtgatccatccacctcggcctcccaatatgctgggattacaggtgtgagccactgcgcccagcctgcagaaatatattttagtactaactctctggtgttttctaaagctatagattttgaaaaaatgtgtttttctaaatgtattacatttgcagagtttttctcccatacagattcactgatgttgaaaaaactttgagcaactgcttcagggtttttctctagtacaaaatgtacatgataagctttatgataccagtaaatgtactacaaccctctttatgtttgtaatctttgtcttcaaaacgaatactcttcttcactttaaaggcttatattttcttaaagtctttagacagtaattgcatttataatgcttttattaagtaccaacattctgatattaagatgtcaacagatattaatggctattttacactctttatatttgtacaatttttcttaagtataaacgctttcctgtgcaataaggtttgagccttaattaacagtattgccaaattcttcacacttgtagttttctccagtatgaattatcttacatacaatgaagtgtgaaaaccatttaaagtctttgacacattctttacatttctagaatttttcaccagtatgatttcctttatatttagaaaaatttgaggtgttgtcaaaatcattatcacacattccagttctgtagtttctctccagtatgtatttttttatgtttagtaaggtttgcagattggttaaaagctttgtcacatctctcacatttatagggtttctctccagtatgaattatcttatgttcagtaagttttgaggatcggctaaaagctttgccacattcttcacatttgtagggtttctccccagtatgaattcttttatgtgtagtaagggatgaggagtgtttaaaagctttgccacattcttcacacttgtagggtatctctccagaatgaattttcttatgttcagtaagttttgaggattggataaaagctttgccacattcttcacatttgtagggtttctttccagtatgaagtttcttatgttcagtaagttttgaggatcggttaaaagctttgccacattcttcacatttgtagggtttctctccagtgtgaattctcttatgtgtagtaagggctgaggagtgtttaaaagctttgccacattctttacatttgtagggtttctcttcggtatgaattttcctatgttccgtaagatttgaggatcggttaaaagctttgccgcattcctcacatttgtagggttgctctccagtatgaatgtttttatgttcagtaagttttgaggatcggttaaaagcttttccacattcttcacatttgtagggtttttctccagtatgaattctcttatgtgtagtaagggttgaggattgggtaaaagccttgccacattcttcacatatgtagggttgctctccagtatgaatttttttatgtgtagtaagatttgagaactggttaaaggctttgccacattcttcacatttgtagggtttctctcctgtatgaattatcttatgtgtagtaaggtgtgaggactggttaaaggctttgccacattcttcacatttgtatggtttctctcgagcataatcttttttatattcagtaaggtttgagaattggttaaaagttctgtcacattcttgacatttgtagagtttctcacaagtataaattcttttatgtttagtaagctttgaagattggttaacagctttttcacattcttcacatttgcagaaattcaccttggtataatttctttcatgtcgagttaggtgtgaaagcatgcaaaatgatctgccacattctttacatttgaaaggtttattttccatatgttttatcttatgtctatctgaatgtgaaaatttattaaagactttcacatatttatcacattgaaacattttgctctgcatagttggtaaacattggttaagtccattataacctcccttgtgcaacttacattcatccacacttttacagccttttaactgaaaattatcatttccacatttttcatatcttctcagtgtcactttttcaaaagaatcttttatgttctgctctggccaaaactcttgggcaaaatgagaacacattactgaaagaaataaaaataacacattactttacagactcagataaatatactttccaaacctaacttataaaattacacaaactacataagcaagatggcaccacaggccataattaagtgtatgtgttgccccaggtgagcacaatgcaaagagccacatagaaaaaaaaaaaaaattctgtcacatttacccaacacagctttttctactccccaatataacataatgttttcagaagtaaattacagccaggtgcagtgactcacacctgtactcccagcactttaggaggctgaagcgggcggatcacgaggtcaggagttcaagaccagcctggccaacatagtgaacccgcatctctaataaaaatagaaaaaaaattagccaggcatggtggcgggagcctgtagtcccagctaattgggagactaaggcaggagaactgcttgaacctgggaggataaggttgcagtgggccaagatcgcaccattacactccagcctgggtgacaaagcaagactctgtctcaaaaaaaaaaaaaaagtaaattgcaaacttcaattatttacatatagaggaatacctgagagtagataatttataaagaaaaaaggtttatttggctcacagttcggcagactgtacaaaaagcatgtgccagcatctgcttctggtgagggtctcaggaagcttacaatcacagtgcaatgcacagattaactggacacatcacatggtaagatacaaagcaagtgtcaggtaaagaagccaggttttctttttttttaaatgaactagctcttacttgaattaacagagtgtaaacttactgattaacaagaagatagtgccaagccattcatgaggaactttccctcatgacctaagcacctcccactaggtcccatattcaccttctatcaggacccaaatcaacaatgatgattacattgcaatatgaggtttggagaacatagacatccaagccatatcacagaccaaataggcttaacagacctgtacaaaccttttcaatcaaaagcaagagaatacacaatatttttctttgcacctggtgtattctgttaggacacaaatcaagtcttattaaatttaagaatgctggctgggtgcatgcctataatctcaacactttggaagacccagctgggccagaaatttgacaccagcctgggcaacatagcgagaccctgttcctacaaataatcaaaaaaatagccaggcatggtagcagccatggcacgtctgtagtgccagctacttgggagactgaggtaaaaggatcacttgagcctgggaggttatggctgcagtggagccactgcactccagcctgagtgacacagtaaaatcttctaacagcaacaacaaataaatttaggaaaaccaaaattataaacattttctgaccaaaagtgaataaaacaaaaaattaaaaggaaaagtaaaattggcaaattgaaaaatatatgaaaataaaacagtgttcaacatattcttggctcaagggccaaaacacttaatttttcaaaaatgtcaatgcaaccaaaagtggtgaacaaattcaacataatctctataaaaaatgcattagcagtggctcatgcctataatcctagcactttgggaggctgaggtgggcagattacctgaggtcaggagtttgggaccagcctggccaacatggtgaaaccccttctctactaaaaacacaaaaattagctgggtgtggtggcatgtgcctgtagtcccagctacacaggaggctgaggcaggagaataacttgaacccaggatgcagaggttgcagtgagctgagatagtgccactgcactccagcctgggtgacaaaatgggactccatctcaaaaaaacaaaaaaggtatacacacacacacacacacacacacacacacacacacacaatggattattcagccttaaataaatctagtcaacattttaagataaactttgagaatattatatcacctgaagtaagccagtaacaaaatggatactatatgattccacttatgtgagatatcttaattagtcacactcatagaaagtgcaagggtgtttgtcaacggctggagagaggataaaatgggcagttgttaatgggtattgagttttagtttcacaagatgaaaaatttatagaagtcttttgcataacaatacaaatatactaaacatggctgaaatgtacagtttttttgagacaggttctcactctgtcattcaagtttgagtaaagtggcacaattatggctcactgtagcctcaaactgccaggctaaagtaatcctgcaccatcaatctcccaaaaagctgggaccacaggtgcacaccaccatgcctggctatttttaaaaattttttgtagacagagaatctccatacgtttcccaggctagtctcatacttttgggctcaagcaattctcctgccttggcctcccaaaatcctgggatcaaagatgtgagccactaccatgcctggccctgaaatacacacttcaatagattttagatggtaaaatttatgtggttttacaattaaattttttaaaagaaaaaatggaaaaaatacagaattataaatctttacatgaattaccttcaaatcacaaaagtgtttctctcacacaaaagaaatatatatttattattaaacacatggtgaaaataagactatctcaccgggtgtggtggctcaccccttgtaatcccagtactttgggaggccaaggcaggtggatcacctgaggtcgggagttggagaccagcctgaccacatggagaaacctcgtctctactaaaaatacaaaaaattagctgggcgtggtggcgcatgcctgtaatcccagctgcttgggaggctgaagcaggagaatcacttcaacctgggaggcagaggttgcagtgggcggagatcacaccactgcactccagcctgggcaacaagagtaaaactccatctcaaaagaacaaaaaagactatctccatgactaatcacttagacaagataaaacaatcattgaaaatcagctaagaaagaatacatacaagataagccataaccaaaattggggtcatattcatagataaacacacatatgtaatctgattgggatagatatgtggctgatttatttcttaattaaatcccacaaagtgtacaaacaattgcaaattgtctaaaatggtaaaacaaaaaaacaataaacagatgtcaaactgaaaaaacacattaatatggaatggcaaaaccatagtaagagaaacgtttactcataaaatcttgcaggcaacactgatgtaccattaaaaatgatgtgtctaggccagatgcagtggctcacgtctgtaatcccagcacattaggaggtgaggctggcagatcacaagttcaggggtttgagaccagactcggcaacacggtgaaaccctgtctctactaaaaatgcaaaaaaattagccaggtgtggtggcgcacacctgtaatcctagatactcaggaggtggagacaggagaattgctttaacccagtaggcagaggttggagtgagtcaagattgcaccattgcactccagcctgggaaacaggagcaaaactccatctcaaaattaaaaaaaaaaaaaacaaaaaacaaagacaattttgggccaggctctgtggctcacacctgtaccagaactttgggaggccaaggaagatggatcacgaggtcaggagttcaagaccagcttggccaacatggtgaaaccccatctctactaaaagtacaaaaattagtcaggcatggtggcatgtgcctatagtcccagctactcaggaggctgagacaggagaatcacttgaacctgggaggtggaggttgcagtaagcagagattgtaccactgaacttcaggctggacgacagggcgagactctgtctcaaaaaaaagacagaaattttacgtcttaaatatatgctattgttacacaaaacaaaactgctgtaatccaactttagaagcaaaaaaatagccttacattgctatatatatatctatagatatctatagagatatagatctatatctctatagatatatagatatatctatatagatatagaaatagatctatagatatctatagatatagatctatagatatctatagatagatatagatctatagataccgatctatagatatagatctctagagatctatagatagatatagatctagagatagagatcgagatctatatatataaaatgttaaatatataaaaatatatatattgcagaatatggttagagcgcctgatatataaaacaaatatctgcgaataaattatattatttagatacaggctggacaaaatgggtgcaaatcatagaattattttttcctacatcaagcctaaatttataagtaacagttttagtaaatatggagtgcctacaaattatctaatttactttagacattacatgtaaattctagcatattgttctaaatttctaaatctaaaattacagacaaaattgaaacagaaaatggagaataaaaatgtatagcaggagtgaaattggtaagatgggagaataaaaggtgccctattttgttatctcctgcacagcaagacaatttgtcagccatccctgacaaaaatgcctttatgagattgccaggcatcatggctcacacctgtaatgaaagatacatgatatattaagtttagagaattgcttcaggttaggatttcaaaatcagcctgaattatgtatgtagcaagactccatctcaaaataagtgcctttgagagctttgagatccagagagagagggagttgtggaactctgataaagcccaagatttaaaagtcttcttttcagaaggcaggccctcattcaggtgcaaactacaggatccctgttcttaactacagactaggaaatggcccacccaacttggtcccactaagaattctgaacttactatgtaaccatcccaaactcctcacagccaaagtctgggagagattctgcttttccagaggcccagaggaaggtacccatttacagccatgtggactggcctaaggtaaaggaccttagtctttactgtggtccttgaagcagttcaatgactcagttccagctcgctgagccacagtttatggtcagttctgcctatacagaaacccacacagtgacctggaaagatcctttctggtactcgctgaaagccatagtcattcatattttgatataaggcccaccatatgcagaccctactgcaaaaacctgccctagtgtctgccctacagagcaaaatcctctgccaaaattcagtctgtccaaaatgggaatttaaactacccaagttttttaggacaagccaactaaaggcagaccctagtgcagacccagcagccttgtgacaaagctacaaccccctctccactacaaacccagagggcatcccatcaccctgagcgtccaacaaaagatctttaccttctgaaaccagtttataaaaacttgaggtgttttctccttctgtacacagatgccaatgcaaaactatattgtgcccattgtcaatgctgctagtttaacataacactgaaagtattggcagaagaattagtcgaaaaatgaaaaagagcaattgaaattgaagacacataagtaaaaagttgctggctgtagctcatatgatcatatatataaacataaacagtacattaaaacttgtaaatacactcagtaaatcagaaaaatataaaactaacatacaagttagggttccataaacttaaactctctgataaaatagagaaaaaaacttatttacaatagcattaaaataataaatttctgagaacaaatttaaccaaggaggtacaaaatctttacagtgagagatatcagtgaaagatattagaaaagacataaataaacttgaaaatattttatgtctatgaactgaaagaataaatactgtgccatgttatccaaaatgatctatagattcaagactccctatcaaaattccagtggcatttgtttttcacagtaataaaaaatataattctaaaatttaaatgaaactatgatacactttaaatagccgaagcaagcttgagaaaaaagaacaaagtagaagaatatcatactttgtaattttcttttttttttttttttgagacggagtcccactctatagccaggctggagtgcagtggcacaaacttggctcactgtaacctccacctcccgggttcaagcgattctcctgcctcagcctcctgagtagctgggattacagatgtgtgccaccacacctggctaattttttgtatttttagtagacaccgggtttcaccatgttagccaggtttccaaactgctgaatcaaaagaaagatttatctctgtgagatgaatgcacacatcacaaagcagtttctcagaaagcttctttctagtttttatctgacctcctgatccgcccacctcagcctcccaaagtgctgggattacaggcgtgagccaccgtgcctggcccttgagccgatgcccagccctttataatttcaagactacattagaagactatagaaatacaaacaagtaaaatgtgtagaaaaatgaaaaaaaaaaagggcggggaatagtggctcacacctgtaatcccagcactttgagaagccaaggtaagcaaatgacctgagggcaggagtttgagaccagcctggccaacatggtgaaaccccatctctactaaaaacacaaaattagccgggtgtggtggcacgtgcttgtaatcccagctatttgggaggctgagacaggagaactacttaaacccaagaggcaaaagttacagtgagtccagactgtagcactgcaccccagcctgggctacagagcaagactctgtctcaaaaaaaaagaaggaaagaaaacaatagaaaagaaaccacttctcatacgtttcagacaagatggaaaaaaagaacttaaaaaatcatttaacagtttctcaaaattatgtaggtatttctgtgcctccaaaaaaaatgagtaaggattcagattgcacagtctcttgtatgccatgaagcggacactggttctcaccgaaaacttaaaggaaaattaccaaaaatgtaaacagaaaccttagagaatttaaaagcataagacagaaaatgctcaaatgtgagagcataaaatactcaggctttccagaaattatttcctttaaaacacggcttcccaaatcacattttaaggactggctttctctttgacctttggacctctcatcagtgtcacctgttgtattcactttcattctcacttacctgggggttcattcaccatctcatgtctcttcacagtcaaaggctctttttcttgctccagacaggtgatcaggtcttgcttagagacagcaatacctgttttattaaaaaataaataacattaattttgctcatattctccaattaccaacctagtaatgtgctcagtaaagagaatgtaatggaatagtctagtaaattaatcccaaaatactgacttataacagaaatttttaaatacttagaaaatattctaaatttgtaggttcttaatttcactacccagtactactgaatcaaaacttggtgttggcaattagattttaaggtgtgggcaacaatattttatgccactaaacttctgaaattaccactagagtgaaggacacagatcagctcaggaatgtgttaagttcagatcaagatgaaacatactaaagaaattcttctctatacagacaaatccttaagattttctcaaaaacagggatctgaaactcatttatgcaaagcatacattaccaaaatatattctacaaagaagagaaatgaaacctttacggtatattagaaactgtctgttgggacaggcatggtggctcacaccagtaatcccagcactttgggaggccgaggcgaatggctcatctgaggtcacgagttcgagaccagcctggacaacatggtgaaaccctgtctctaccaaaaatacaaaaaaaaattagctaggcatggtggctcacgcctgtagtcccagctacttggaaggctgaggcacgagaattgcttgaacccaggaggcggaggttgcagtgagccaagatcgcaccactgcactctagcctggtgacagagccagactccgtctcaaaagaaaaacaaaaaaaaaaagaaactgtgtgtttaagttatccttacccaggaagaccaggtttctgtagttctctaaaatcacatttttatataaattccgctgtgcagtgtccaggcattgccattcttccagagagaattctatggccacatccctaaatgtcaacagtccctgaaaaacacatacacacaaacatattcaccaggtagccaacagagattataatttgactcaaggtaaaatgagagactaaagagaacaggttctgatttataggagtgactgaaattatccaataaaatcatattttttacacagaaatatttcctaatgtgttctctaaccctgagaaaacagagtggcacaagagccacaacaccagtgtatatataataattttctaaataataacatatataataggtcaggcacagtggctcatgcctttaatcccagcactttgggaggccgaggcgggcagattacctgaggtcgggagttccaagacccacctgaccaacatggagaaacccaatctctactaaaaatacaaaattagccaggcgtggtggcgcatgcatgtaatcccagctactcaggaggctgaggcaggagaatcacgagaatggcttgaacctgggaggtggaggctgtggtgagtggagattgcagtgagctgagatcgtaccattgcactccagcgtgggcaacaagagtgagactccatctcaaaaaaatacataattaagggcataaacacaaacacgtagctttttgagtgcttcacaagcttctgtgtaataaatgctatcttgtttaaataatagctaattgagaacacagatggagcctcaacattagatgttctccatttttactaaggaccgcaggttttcccaatagaaatgttgagttatctacacctttgcatgttcaatagccacaggtaacatttttaatattgcagattataaaataatcgtgagaattctgcatggcatataagaagtcatgatgtagagaagcctctggtatatggaaaagaagtatttttcagagactcttgactatcataagagtttttataagtagttaaaacaaattcattagggagaaaaaacccaagtagagaagtcaaagtttgcaagtactaaacgcatggcattccaggaggcagagcggacacagctcttgatctgagacatgtttaactgaaaaaaagccattttttcctttctctgaaaattcttttcacatgcgattctctggacaaattacacctgcatctggagaatatgcctttaaaggtatcagcaccacatgtttacctggtaccaccacactcacaggcagaaggaccaagactcacagaaaaagtccacccatttctgtccttcataccagaagcgattcaggaaccatgagctgctccacggagataaaagtaaaagttccttttcttctgtcctcaggtgtcctcccctgccatggacatcagcaatttctgctacagcaatgaaaatacggaccacactttcctgtcactaccaaaccaaacagaaccagccctttgaccattctttagagcaaaggtagaactctcatgaatatatcttgaacccctcatacttgattttggcctcatgttagagtcacaagaggcacttaattaaaacaacatgggcgggaacagtggctcacacctgtaatcgcagcactttgggaggccaaagtgggcagatcactcgaggccaggaatttgagaacaacctggccaacatggcaaaaccccatctctactaaaaatacacaaattagccaggcataatggtacgtgcctgtaatctcagctacttggaaggcagaggcaggagaatcgtttaaacctggcaggcgaatgttgcagtaacctcaggtcgcaccactgtactccagcctgagcaacggagtgagactccgtctcaaaaacaaaaaacaaaacatgatacctccgcccagaagaataaacagacctgtggatagggcacaagtagatatttctgcaaactggccatgtaatcttaattagaaacctgggctgggcatggtggctcacacctgttatctcagcactttgggaggccaagacggggggatcacttgaggtcaggagttcctgaccagcctggccaacatggtgaaaccccatctctactaaaaatacaaaaattagccagccgaggtggcacttgcttataatcccagctactcaggaggctgaggcaggagaatcgcttaaacccaggaggtggaggttgcagtgagctgaaatcgcaccactgcactccagcctgggcacagagcaagaccccacctcaaaaaaaaaaatcaaacctgggctgaaaaccacttagctgggcattgcctttaaagctttaatgggcttaaaaaatacttggaaactgtggctccactctctgtgatgtaattctgcagacttagggttcatgagtggtttttttgttctttgggtttttgtgtgtgtgtgtgatggagtgtcgctctgtagcgcaggctggagtgcagtggcgtgatctcgactcactgcaacctccgccccctgggttcaagcgattctcctgcctcagccttgagtagctgggataacacaggcgcctgccaccacaagcagctaattttttgtgtattttaagtagaggcagggtttcaccatgtcggtcaggctggtctcaaactccagacctctagtgattcgcccaacttggcctcccaaagtgctgggattaaaggcatgagccatggcagccagccattaatgggtattttaaacccattaatgttccctatcaattgcttttctggggctcatgattagcattagagaaagcaggcacagcatggagtcccttacactcagcactcttgttacaacacaaatacttctcaaatgaagactaccaattttcatattctttgctggctctttaaagtttacagaataaacagaaggcagcaacatctaaataagtctgcatgtggaaaccatgaggtacacatgtactaatgaggcaagagaatagggtctggaggcagggaacctaagaccatttcacaccgaattcctagacctaaatggaaaggaaaactaactttccatgcctaagtaacaaaaagaccagaggctactgcctttgcaaatccccaccttttctgtgaggcagataggaaattggctgtccacaaccattcagactgattgtgggctgagtctctatttgaataaaagtgacactttgtaacttcaccttagcctctaattggttgcttttgcaatcaattggatatttgcagaggattgtgacctttttaactttgcttcagcatctgattggtttcttcctgcaactaatcagagcaattgtgggccaccacttcatttacatgaggtgagcaccaagtggccaatgggaaacctctaggggatatctgaacccaagaaaattctgttgtctgggaccttaagccattgttcgggcccactttcacactgcagagtgtaatttcattttcaataaacccgttttgttcctttgttgcttcattcttttcttgctttgctgtttcatccaattctttgttcaaaaggccaagaatctggacaacttgcagtcaagaccctctactggtaacttattttggtgagccaggcaggagaggaggtaggcccaaagtattggatttaattttttcctttctccttttacatacagggaagtctttctctctttttctctttctctctctttctctctctctcctcccctccccccaacccagggccactttttgatgaaactgaaaggtttccacgtgcaagtgcctgactaccacctcacagtttgggtgagggacctgagacctttcgtctgtttgtttttctgagtcctattgtttttgtcctttttctgagactgtgtccggaattggtgggttcttggtctcactgacttcaacaatgaagccgcggaccctcgtggtgagtgttacagctcttaaggtggcgcgtctggagtttgttccttctgatgttcagatgtgttcggagtttcttccttctggtgggttcgtggtctcgctggctcaggagtgaagctgcagaccttcgcggtgagtgttacagctcttaaggcagtgcatctggagttgtttgttcctcccggtgggctcgtggtgtcactggcttcaggagtgaagctgcagatcttcatggtgagtgttacagctcataaaagcagtgtggacccaaagagtgagcagtagcaagatttattgcaaagagctaaagaacaaagcttccacactgtggaaggggaccccagcgggttgccactgctggctccggcagcctgcttttattgtcttacctggccccacccacatcctgctgattggtagagccgagtggtctgctttgacagggcgctgattggtgcctttacaatccctgagctagacacaaaggttctccacgtccccagcagattagttacatacagagtatcgacacaaaggttctccaaggccccaccagagtagctagatagagtgtcgattggtgcactcacaaaccctgagctagacataaatgttctccaaggccccaccagagcagctagatacagagtgtcaattggtgcactcacaaaccttgagctaaacacacggtgctgattggagtgtttacaaaccttgagctagatacagagtgccgactggtgtgtttacaatccctgagctagacataaaggttctccaaggccccaccagagcagctagatacagtgtcaactggtgcactcacaaaccctgagctagacacagggtgctgattggtgtgtttacaaaccttgagctagatacagagtgccgactggtgtatttacaatccctgagctagacataaaggttctccaaggccccaccagagcagctagacacagagtgtcgactggtgcactcataaaccctgagctagacacagggtgctgattggtgtgtttacaatccctgagctagacataaaggttctccaaggccccaccagagcagctagatacagtgtcaactggtgcactcacaaaccctgaggagctagacacagggtgctgattggtgtttacaaaccttgagctagatacagagtgccgattggtgtatttacaatccctgagatagacacagggtgctccaaggccccaccaaagcagctagatacagagtgtcgattggtgcactcacaaaccctgagctagacacagggtgctccaaggccccaccaaagcagctagatacagagtgtcgattggtgcactcacaaaccctgagctagacacagggtgctgattggtgtgtttacaatccctgagctagacatactctccacgtacccaccagactcaggagcccagctggcttcacccagtggatcccgcaccggggctgcaggtggagctgcctgccagtcctgcgccatgcgctcacactcctcagcccttgggcggtcgatgggactgggcgccgtggagcagggagcggcatccgtcagggaggatagggctgcacaggaacccacggaggcgagggaagactcaggcatggcagactgcagtcccgaggcctgccccgcgggaaggcagctaaggcccggcgagaaatcgagcgcagcgccagtgggctggcactgctgggggacccagtacaccctccgcagccgctggcccgggtgctaagtccctcattgcccggggcgggcagggccggccgggggctccgagtgcgaggcccgccaagcccacgcccacccggaactccagctggcccgcaagcaccgcacgcagccccggttcccgctcgcgcctctccctccacaactccctacaagctgagggagtcggctccggccttggccagcccagaaaggggctcccacagtgcagcggtgggctgaagggctcctcaagtgccgccaaagtaggagcccaggcagaggaggcgccgagagcaagcgagagctgtgaggactgccagcacgctgtcacctctcaagaccttttccttttctcctttttcagtctttcagcagccattttctagtagatgttggtaattgagtggaactagccagagccactctgatgttctctgaaggccaatgagcaaacagggctgcctgtcctgcccagaagggggaaagattttctatcctttctggttatagtcccttatccctacatatgacaccgttggcagcgggcagttcgcccagggtgaatcacatgtttcaggtgacttaaaccttcttttcttttcttatgctaaattcttcccttcccccactcaactagctatgaacagaaaacccacctagctatgcaaaaaggttatataagtcagagggtccaagcatgttgcaggtggtctctgaggtgcacggtggtgggggggtggggggagcttatgaaaggaaatgtattattgctgaagttgagagagttaaagggttgctttaaatgggatagataaacctttaaaaaagctcatagtagtccgggcgtggtggctcatgcctgtaatcccagcactttgagatgctgaggcggacagatcataaggtcaggagttcgagacctgcctgaccaactaaaactacagaaaaattagtcttgcattgtggcacgcacctgtaatgccagctactcaggaggctgaggcaggagaatcgcttgaatccaggaggcagaggttgcagtgagccaagatcatgccactgcactccagcctggacaacagagcaagactctgtctcaaaaaaaaattaaaaaaaaaaaacaacacctcatagtaggtcatcagtggtggagggaaccattctaaagttgtgctggcacctatctaaggtcagagccatctgacagactaagtctggggcctaaagaggggatgttcccagagaccccagtctgggccaagaagttttccagggagatgccccaggaaaaatttgggtcacctaatgagccctctactttgcaaagtcctcttcttttttctagaccactatgagcaactcttaatctatttcacctgattccactgtggggaactctatttccaattctgattccctgcttggctatatcttccaccattagaatcaatttgaccctgacaatctaacaagaaaatgtataatatttttctgcaatactgtctggccctattatgagctgctcagttcagaacactgggcagtcaatggtagcattaattatgacgctatcctgcaatcaggcctattttgcaagaggcagggcaaatggtcagaaatctcctatgtacagcccttcatgaccctatatcaaaacctaacaatctgtgaaactcccagaacctaccccccaaaggaaagttctaaggcagaagtagatattatagataaccttttacagggccacctggttctcagggtgagtagcgaccatccttgccaagcgaccccttgccaagtgcttctgaggctaaaactcagaagcaaacaccggggaccctacaagttcccctcatactcaagggggaacactgtattgaactctctctccagccctgctacctcttagggtagcaggagctgagaggccagtcctagtgaaggtccccttctctatataactgatacgcaacaatgtaaggagaagctaggaagctattctgagaatcttgggaaatttgctgatgggtttcaaactttgatctctcatggagagatgttcaatttattctagcaacctgttgcatcccttcagaaaaagaacaaatcttttgacgccacccaccaggaagcggatggattattcacctgaaaccctcagggcaaacactcaggaccagaaacagttcccactactgatcctcattgaaactacaacaccactgtaggaaacaaccaggctaaatttcttgaggctctccttggaggaatgagaaagggaataactaaggcagaaaattatgataaagtacagaaggttacacaaagcaagaagaaaaatctagccatgttttatggcaggttggaggaagcctttaaaaaaatatactaatctagtcccttcctcttcctgaagggaaaatactaatggcaaagcattttattagccaatctgcccctgacattagacataagctccacaagctacagatagggccacagactaaccaaaaccagcttcttgatacaatgtttatggtgtataacaattgtgacctgaaggaaggaaaaaggaaacagagtgaagaaaaacggcaagtcaaaattatggcagccatcattggtgatgtcctgaatgcccgaagagcatctaaggaaaatctgaagggccataaagataaagccagcagagactcttgcttcaaatgcaagaaaagtgggcattgggcaaagggatatactaagcccctgccaggtccctgctgtcaatgcaaaggtaccagtcattacccctggagaactgactgcccctgtgccaccatggggttgggtcagaaaactctagcagtgcaaaaggaggaattagatgaagactgaaggggcctgggatcttcctcactgcccctgtctaggaacatcgtagcaaccacatcatgcccaattcagcggtttatctagttgctatagtctagactaaaagttcccggatgacagggaccatgactgctttatctatttatctaatggtcatatgaaatggaagcaattagtttatctgagtctccagacctcttccttgtttttcacctaagtaccaggaaactggagaaactctcatctgagtaccaaccaaagacatctcttgcatgggggtaggaacaaacacaggatgacttatttctcttgcactgagacagaagcagaattaaccactcatgtcagccttacacaattctgttctggacattttcaaatttctcaaggatgcctaggtgattgtgagagggttctcagtgcccctgagctggtggcccaatgataagctagggatgagagactcaggctaaatgaagaatggaactgtcctggtagagctccacaacttgaattgcatgtcctgattagttagctcttgggtttaaaaaaaaaaaaaaaaaaggacaagaatactctactccagttagttagctcttgggtttaaaaaaaaaaaaaaaaaaggacaagaatactctactccagtatcacattttatgggtaggtatagtttggtcatggcactggataccttgtaagtcttaatctcttactctgaagatgcttgtttacacttacagattctgtaatcagattctatttacacctggagcccctcacataactgtagaaagtcactgcacaagatctgagaagttcaaaaacccgcaccctcaaaaaggggttttaatatttccatgttgacatctcacaatgcagaaaatgtcccccgtatgttttctgtacattctcaatcgaaagcctaaccttgacttgtgaatcccagacagaggttagaccttatgtgcagattctacgtcagataaacctggctctgcattcctgtgtgtcacagaaagtggagtacaatcaaaggagaggtccactcacagaggctgctctagctcattctaaatgatatttctacctaaaagggaaaagttgaggcaacataaatataaatagacagttttgggaggaccaagcttgaggattataacatgaaagcaaagactcaagttgcttggaatttatattttgcttaccaccagttacaagtgtatttgtaaaggtaaaaagaggacagaggctgttctctctttgggctggtacaaacttgtttgtcagaaactcttacttacaggaataacattaattattgactggatgtacatcattaaggcttagagtgtccagtgtggcattattaatttaattcacagctactggtggcaatagcaaacagtttcaaggtatgaatacatatagttgaaagtggggagaaagacataattgtgctctcattttaatgtctcttcaagtttgacaactaaaaggacctgcatttcccagatataagttttttaatttccaaaatttcaagacctagattcagaatttggagctgcagatttaggttctggatggataagagtatcagcaggtgttacctgcacatttgtgagcatttcagtaacaggaggaagtggaaagtggagattctcatgtctatgtgtatactcaatgcacacctgttactctaattgggtttgtgggccccatggtctctaaatcagtttcaggtctgaagatacaagagtaattgaaagaggtaaaatggctgattgctgccctgtgaagttcgtagaaatctggcctagcccctccagaagtgactgtagaggactatcaataccaaataggagagacaattctgcctgcatatttaggcgacagcatgcacttggcagcaaatttgggagtgactggaagcctgagagggtaagcccactctagagtagatcctggttggcaccttatatgtttctatcatatctggtaattccagacagtgtttgggaaatatcattaaaataaaaattttctggttgggggcaaggggagggagagcattaggacatatatctaatgcatgtggggcttaaaattagatgacaggttgataggtggagcaagccaccatggtgcatgtatacctgtgtaacaaacctgcacgttctgcacatgtatcccagaacttaaagtataatttaaaaaataataataatagaagaaaaaattttatccggccccagagaaactccacaatgatagaacattaagaaaactgttggccgggaacagtggctcacgcctgtaatcccaacactttgggaggttgaggtgggtggatcacctgaggtcaggagttcgaaaccagcctgaccaacatggtgaaacactgtctctactaaaaatacaaaaatcagccgggcatggtggtgggcacctgtaattccacctactcaggaggctgaggcagaagaattgtttgaacccgggaggcagaggttgcagtgagccgagatcaagccattgcactccagcctaggcgaaaagagcaaaactctatctcacaaataaaataaaataaaacaaaaataaaaataaaatcctgagtcacaaagaatgccaaaaagtttatttacctgttaatatgatacacatttatttttaaaaagcagagaaaaatatctacatataacctaaatgcttaaagaagtgagagatgggcaggccacaggggctcaacgcctgtaatcccagcactttgggaggctgaggcaggcggatcacctgaggtcaggagttcaagaccagcctggccaacatggggaaaccacatctctactaaaagcacaaaaattagccgggcatggtggcgggcatctgtaatcccagctactcgggaggctgaggcaggagaatcacttgaacccaggagacggaggttgcagtgagcctggtcgacagaacgagactccgtctcaaaaaaaaaaaaggagagagataagcaaaatattctttattattttcaggtataaaaacagagccttttggttgggtgcagtggctcacacctgtaatcccaccactttgagaggccaaggtgggtggatcacttgaggtcaggagttcaagaccagcctgaccaacatggtgaaactctgtctctactaaaaatataaaaattattagctgggcatggtggcacatgcctgtaatcccagctacttgggaggctgaggcacgagaatcacttgaacccgggaggcagaggttgtagtgggccaagatcatgccagtgcactccagcctgggtgacagagcaagactccatctcaaaaaaaaaaaaaagagagagagagagccttttatttctaacttaaattttctcttacaacagccaggtctctggatatgttgaactcttcgacatcttaattttagtagacactggattcaggcatctaaggagtagcattgggcacacagtattcacttgaaagaatgtttatggggaaaaaagcagaagagaaaaaggtgctataaaaaatccatgggtccacataaataaagcaacttcttagagacctatgaagacagttggattcttacacaaaaatagtgggaggctacaatacaccacagacactagtaaacaaatcactgaggcagaaaaattaacaaagatattaggacctaaactcaacacttgaccaaatagtaataaaatatctatagaactctccatctaaaaacaacataatatacaatgttttcaccaccacagggcacatactctaaaactgaccacaaaatcagaaataaaacaatcctgagcaaattcaaaaatttcaaaattgtatcaacaacatactcagaccacagcttgataaaaatataattcaatacaaagaaaaccacttgaaaccagacaactacatgcaaattaacctcaatatgaatgacttttgggtaaataataaaattaaggcagaaatcaagttctttaaaataaatgagaacaaagacacaacataccagaatcactgcaacaaaactaaggcagtattaagagggaaatttatagcattaaatgctcacatcaaaaggtagaaatatctcaatttaataacctgacatcctaaataaaagaatgagagaagtgagagcaaatcaacccctaaggtagaagaaaacaacaaataactaaaatcatatctgaactgaagaatatttagatgatgtaaaaaactacaaaaaagactaaaaaattagaagtaaatgttttgaaaaaactcagtaagataaataaaccactagctagattaatgaaaaaaagagaagatccaaaaaaaaaaaaaacacaattagtaatgacaaatggacattatcactgatttggcaaaaatacaaacaaggatgaaagtctacaatgagcacttctatgcacagtaactaaataatctagaagaaatgaataaattcctggacaaatacctcctccctagactgaacaaaaaagaaattgaacccctgaataaaccaataaaaagctccaaaatcaaattaataataagtagcctaccaaccaaaaaaagcccaggaccagacggacttacagctgaattctaccagatgtacaaacaaaagttggtattatttttactaaaactattccaaataattgagaaaggacttctccccaagttattatataagaacagcatcattctgataccaaaacctggcaaagacaaaacaaacacacaaacaaaaaacttcaggccaatatttttaataaatattaacaaaaaatcatcaacaaaatactgaaaaaccaaatccagcagcacatcaaaaagttaatccaccattatcaagtaggatttatccctggaacacaaggttggttcaatatatacaaatcaataaatgtcatttatcacttaaacagaactacagacaaaaaccacaaaattaactcaatagatgcagaaaaagctttcagtaaaatttaacatccttcatgttataaccctcaacaaactaggcattgaaggtacatacttcaaaagagttatctacgacaaattcacagccaacatactgaatagatacaagttgcaaacattttttttcttgaaaactggcacaagacggccgggcgcggtggctcacgcctgtaatcccagcactttgggaggccgaggtgggtggatcacgaggtcaggagatggagaccatcctggctaacatggtgaaactccgtctctactaaaaatacaaaaaattagccacgcgtggtggcgggcgcctgtagtcccagctacttgggaggctgaggcaagagaatggcggcgttaacccgggaggtggagcttgcagtgagccgagattgcgccactgcatcccagcctgggcaacagtgcaagactgtctcagaaaaaaaaaaaaaagagaaaagaaaaaaaagaaaaagaaaactggcacaagacaagggtgccttctctcaccactcctattaaacatggaattttgaagtcctggctgagcaatcaggcaagccgaaacaataaaagcacccaaaaagaaagaggaactcaaactatcccgggtgcagatgacatgactctacatctaaaaaaaacctatagtctcagcagaaaagttctgtaagctgacaaacaacttcagcaaagtttcagaatacaaaataaacatacaaaattagtagcatctctgtacatcaaccatatccaaagcaaaggccaaattaataatacaatcctagctgggcacggtggctcacgcctgtaatcccagcactttgggaggccaagaggggcagatcacctgaggtcgggagttggagacaagcctggccaacatggggaaacctcatctctactaaaaatacaaaaattagccaggtgtggtggtgcatgcctgtaatcccagctactcaggaggctgaggcaggagaattgcttgaacccaggaggtggagattgcagtgagccaaaatcacaccacttgcactccagcctgggcaacagagtgagactccgtctcaaaaaaaaaaaaaaaaaaaaaatcccatttgcagttgccacaaaaacgaatatctagaaatacagctaactagggagatgaaagatctctaggacaagaattacaaaacacttcttaaagaagtcagagatggccggctacagtggctcacgcctgtaatcccagcactttgggaggccgaggcgggtggatcacctgaggtcgggagtttgagactagcctgaccaacatagagaaaccccatctctgcctaaaaatacaaaattagcacggggtggtggtgcatgcctgcaatcccagctactcgcgagtctgaggcagatgaatcacttgaaccccagaggcgggaggctgcagtgaaccaagatcgtgccattgcactccagcctgggcaacaagagtaaaactgtcttggggggaaaaaaagtcagagatgacgcaaacaaatggaaaatcattttgtgctcattgatagaaaagttcggtattaatatggccataccaccaaaagaaatttacagatatgttatttctatgaaactatcaaaaatattctttttttttttttttgacggagtttggttcttgtcgcctaggctggagtactgtggtgaggtcttggatcactgcaacctccacatcctgggttcaaggctgcctcagccacccaagtagccggattacaggcatatgccaccacaccaggctaattttttgtatttttattagagacagggtttcaccatgttggccaggctggtctcgaacccctgacctcgagtgctccacccacctcggcctcccaaagtgctgggattacaggtatgagccaccacacctggcctcaaaaatattcttaacttaaaaaaaaaaaaaattaaatacatatggaaccaaaaaagagctctaatagccaaggcacttttctaagcaaaaataacaaagctggaggcattacattacccaactttatcttacaaagctacagtaaccaaagcagcatggtactggaacaaaaacagactcagacaaatgcaacagaatagagagccaaaaaataatgccacgcacttaaaaccatctgatcttcaacaaagctgacaaagagaaatacaggaataatttcctatttaattttaaatgttatttaaatttttaatgtaaacatttaaatttctggccaggcgtggtggctcatgcctgtaatcccagcactttggaaggccgaggcgggtggatcacgaagtcaggagatcgagaccatcctggctaacacggtgaaaccccatctctactaaaaaatacaaaaaattagccgggcgtggtggcaggcacctgtagtcccagctacttgggaggctgaggcaggagaatggcatgaactcgggaggcggagcttgcagtgagccaagatcgtgccactgcactccagcctgggcgacagagcgagactccgtctcaaaaaaaaaaaaaaaaagagaacaaaaattaaatgtaaatatttaaataatcttattaaaaataatgccacacacttacaaccatacgatcttcaacaaaactgacaaagagaaatatgggaataatttcctatttaataaatggtgcagtaataactatttagcactatgtacaaggctaaccctggatcccttccttacaacatatacaaaaattaacaagataaattaaagacttaaatgtaaaacttagaattataaaaaactctggaagataacctaggaaatatcattccagacacaggaaccagcaaattttataatgaagataccaaaagcaattgcaacaaattgacaaatgggatctaactgaagagtttcttcatagaaaactattaacagagtaaagacaacctacagaataaaagaaaatatttgcaaactatgcttttgacaaaggtctaatatccagaatccataatgaacttaaataagtttacaagaaaaaaaaaaaaacctcattaaaaagtaggtggccaggcaccacaacctacttgctcatgcctgtaatcccagcactttgggatgcagaggcaggtggatcacctgagatcaggagtttgaaaccagtctggccaacatggtgaaaccctatctctactaaaaatacaaacttagccaggcgtggtggcaggtgcctgtaatcccagctacttgggaggctgaggcagaagaatcacttgaatcagggaggcagaggttgtggtgagccgagattgcaccactgcactccagcctgggcaacaagagcgagactccgtacccccccccaaaaaaaaacattaataaaaacaaaatatggccagacgcggtggctcacgcctgtaatcccagcactttgggaggcctaggcgggcagatcacgaggtcaagagatcgagaccatctggccaacatggtgaaaccctgtctctactaaaaatagaattagctgggtgtggtagcaggctcctgtaatcccaactactagggaggctgaggcaggtgactcgcttgaacctaggaggcggaggttgcagcgagctgacatctgcacaactgcactctagcctggggacaaagccagactccgtctcaaaaaaataaaaataaaataggtacataaacatcatggaacactgtgtggccataaaaagagaccaagatcatttcttttgcagcaacatgtacagagctagagaccactatccttagaaaactaatgcagaaacagaaaatcaaatgcatgttattatttataaataagaactggctgggggcagtggctcaggcctgtaatcccagcactttgggaggctgaggtgggtgaatcatgaggtcaggagtttgagaccagcctggccaacatggtgaaaccctgtctctactgaaaatacaaaaattagccaggtgtggtgggcgcctgtaaccctagctacttgggaggctgagacaggagattcgcctgaacctgggagatggaggtggcagttagctgagatcgtgccactgcactccagcctgggcaacaagagcaaaactccgtctcagaaaaatttaaaaaaataataataataagagctaaataataagaacacatggacacaaagagaggaacaacaaaaactgagacttagttgagggtggagagtagaaggacaaagagaatcagaaaaaaatacttgtttggtgccatgcttagtacctcagtgacaaaataatctgcacaccaaaccttcatgacacaattttacctataaaacaaacctgcagatgtacttatgaaccaaaaataaaagttaaaagtaaaaaatccatgggtggaggagagtgcaatgtaagtggaaggactggtttgtactacagatagtggcttaggtgaggctacactgatttatttttgtgcccatgaaggcagaagagattatgaacagttggtcaaaaccctaggatggtggagaaaacagattactgctgcagattcagtgtctgcaggtggggatattccaggagacatagtcattttttgggtttttcgcaagaagcactaggataaacaatgctgttgtgaattttctgagggtggtacctagtcctgggaggggtgtgggcacgtcaatgtctagtgggtgtgtttgtgagtgggtggaaatcttgtggtggtagctgtgggaaagtggggtttgttatcacagctcttgtcctttaagttttcagtcctccctcacccttggaggagacctgaaatcacaggacaacgagcttgtgtacaggagagcagagcctcccattccaggcacccagagttccattccaggccaggcctctgtgatatcttttttctggcaccaaatctgtagagtttactgaacaccaagcaatcctccaacactcattgtctaacgtttgaattctgacaccacccagagtcagcatagaccctgattcagagcacaatccacaacactgtctttactgcagatgccagtcacaaacttcatgggctgatctatgcttctgagccactgtttaataactggggactcccagaactttcctcaagttcagtaatataacagagctattcacagaactcagtgaaacactgtagttatctttaccagtttattataaaagatacaactcagaaaaagtcaaatggaagaaatacataggaccaggaaaaaaggtggggaaaaatgaagcacatagataatcctggtaaagagctatgattaataaaattctccatctttgtattctccaaaaatagtttttcaaaagaaataccctcttattatgacttagatggtgctctctcttttctcacctgttgtagagccagacatagactctgcatattttcttccttttcttaaaaaaatcagctaaatttgtcttcagtggtcaaaataaaatacttcttaatcaaacttctttttcccacagcaactaaactttgagctacactcagtctgagccaacatacaaccccattttatgttcaccctaagaatatgctaacttcagggtaaaacattttctgatctaaaacctgactttttcactctctattcaccattcttctgctattttctttctaatcttgttttctcccctctgtggaaaaaaagtctgcctgaactttgcaataatagttggtacttcctcctgttgcaatactcctttggaattaaaattttttttacataaatctataactttaattttacaaaatttagaaactgcctcaaaacaataatacttatcttcagtaagaccttcacagcactttttcattttaaccttaactgcacctgcctgtgcatccccagcttcccagggctctcaagcttctctcaggataaagccttcttccatggctggggtgagcaggctgacatatctgcagaaaaggctccccagaaagaactaactgggcctttaataacctccttttgcaggctcaatattagctttagatgggctcaagctttaattttcatgtctgagttattcacttggtgtctgaaactatgtgtttgaaaaatccagcaaaattactgaaacgcagtgttagtatataaaaagaaaattttaaggtgcttccatttcatacctctgtaagaaaaccaaaagtatctacacctttcaaacaattaaagtattattttattatttattttaaaagttatgtagtaggccgggcacggtggctcacacctgtaatcccagcactttgggaggccaaggccagcaggtcacctgaagtcaggagttcgagcctagcctggccaacatggtgaaaccccatctctactacaaatacaaaaattagccaggcgtggtggtgcgcatctgtaatcccagctactcgggtggctgaggcagaagaatcacttgaatctgggaggcggaaggttgcagtgagctgagatcatggcactgcactccagcctgggtaacagagcgagactcagtctcaaaaaaaaaaagaaagttatctagtaaacaattagtcatatgagaacacttctaggaggtaccaaatttcatctcataacacttagcattaaattcagaaatcaagatcataggatatagaacagatattcactgccacaaatttatggtgcaaaaagaggaactatgttttcatgaatctatgtaactcaccaattatctactacattttcttgtggaaaggtatttaatttttacagccaaaaaggaagagagattgtctcgctctgactcccaggctgcagtgcagtggtgcgatctcggctcactgcaacctccacctcctgggttcaagcgattctcctgcctcagcctcccaagtagctgggactacaggcacgtgccaccatgcccggctgatttttgtatttttagtagagatgaggtttcaccatattgaccagactggtcctgaactcgtgacctcgtgatctgcccacctcagtctttcaaaatgctgggataataggtgtgagccaccccacctggcccttattcttttccttagtaggattctaacagctaaaccttggaattctgtttgaaattacccagccataaacacaactgacaaattttctaaactcactctgggaaagaaaaaggtaaataaaaacttttaacaaatagaatatataattaaattttttttttctgaaacccaactcttacatgctctttgcacatattttcttccctttcaaatgctactaataaaatgcaatttacatttaaaaaaactaaagtcactgactgggcgtggtggctcacgcctgtaatcccagcactttgggaggctgaggagggcggatcacgaggtcaggagatcaagaccatcctggctaacacggtgaaaccccgtctctactaaaaatacaaaaaaattagctgggcgtggtggcgggcacctgtaatcccagctactcgggaggctgaggcaggagaatggcttgaacccgggaggcagagcttgcagtgaccccagatcatgtcactgcactccagcctgggcaacaaatcgagactccgtctcaaaaaaaaaaaaaaaaaaaaactaaagtcaaaataagtgcactaatcttttcaaggtgacaaactagggagtggcaatgctgattagaaaacagatgtgttggcccagggcagtggctcatgcctgtaattccagcactttgggaggccaagaggggcggatcacctgaggtcgggagtttgagacaagcctggccaacacgggaaaaccccgtttctactaaaaatacaaaattagctgggcatggtggtgcatgcctgtaatccctgctactcaggaggctgaggcaggagaatcgcttgaacctgggaggcggaggttgccatgagccgagatggcaccattgaactccagcctgggcaacaagagtgaaaccccatctcaaaaaaaaaagaaaacaggtgtgtctaattcatgtgtcaagtcaggtcaccaatcacttgagagattctcccaccccatcctgctcacttaagtgctcaatgaccaccctctcactgcactatgcctcagtgactgccccaagtgcattttactttgcaagtttttgcatcatttcactgaggtcacttttttttgtcttttgaaatgctattttttctttcacaaatcttagacaattcaggggacagaaattatctctgtgtttttccctcaataccagcatctgattggctgaccagcaatatgtctccaagaaatggaagctgggttgagtaaaggcaatcttcatgtctcaaaggcttagtttttctttttttgagatggagtttcactcttggtgcccaggctggaatccaatggtgcgatctcggctctcagcctccaaaatagctcggattacaggcagccaccaccacgcccagctaatttttttgtatttagtagagatggggtttcaccatgttagtcaggctggtcgcgaactcctgacctcaggtgatccaccgcctcagactcccaaagtgctgggattacaggtgtgcaccaccgtgcacgcaagggttagtttttcaaaggaagagcgcaggggagagtcctatcagtccaagggcattcatctgtttccattgagaggctacactccatacctcaggttgttttatgaaagaaaataacccagtagattatattcactagacactcgagcagacatagccatggtagatatattggtttattcacagaaactactgaagcccaggaccagaaaaaactgaaggtggctgaggccacatcacccataaagtttccaaagggaaaccttgacccaaaaatattctgatactatctctgtgcctagagaagatttttaaaaatgaggcgaaaagattttttacaatacagtatcagggaattgttcttctttttcttctcataaaaaatattttcaaacagaaaacgatttttttaagtgccattcaatgtcaaaaaatgcttagttaaaatacagtatctaaagtgtacaataaaagacaaatagttgataatgtgaattagaaaggggaagctggcatttgagaatgtgagaagaaactggaaatttagtattttactgcaagtcatagttagtctggaggaatgggatgaggggtaggcttgagacccagcttgagagaactgtgaaaaatgcaggggaaaatcagtctcctgtggagtgtgaaaataactaagtagcaggcaattagacggaggttactctagtccctgggttcctattttttaaaaactctaactcaaatgcatttttttgcaaattactgaattgagggaaacaaaaatttaggcttaaccaatcataaactgccaattaacctctgattacataaccaggaaatgtccaccttaattgtacaagtcaagtaactatgaactgtacctaaccaattatttaatttggttttcttcatcatgtacctttaaaagtctttccttcaagctgctctcataaagtcacaagctccaaaccacagctgaatgctccacaatttttgaatcactctttgattaaattctccaatatttttgtggtgatccccataatttatttatttatttaacttatttatttatatattttttaagacggagtttcggtcttgttaaccaggctggagtgcaatggcgtcatctcggctcactgcaaccgccacctcccgggttcaagcggttctcctgcctcagccttctgagtatctgggattacaggcatgtgccaccacgcccggctaattttgtatttttagtagaaacggggtttcaccatgttggtcaggctggtcttgaactcctgacctcaggtgatccacccacctcggtctcccaaagtgctggtattactgacctgagccaccgcgcccggccctcccataaaattttaataggagaaaacaggaactgggaaccccacggaccaaaactcttcccattaatgaacccgcaccctgagtcaggattctccggtgacggccctcctgtggtccctgcacaatctgagagaaatgcggcgctgcgggtacagagctgcccagagagggctacaggccagggcacagtcactaggcagagaagagacgggatgccccggggctggctgtcagcgcgccgccatcttatggctgcaggggactgagccgagctggggaaggagaactcggggtgcagattgtggagctgactgcggggaggcctgagtcccgccatagccatttcccacgggttccaaccagccccttccccctctcgggatgtcgcacccgtaactctcaccatttctaggcttccagggggtcctggagtcttagctgtggatctctcaatttctgcaggtcacaggcccacagaggctggacctctaggagcagaggacacagagcaatgaaagcgagacctggagctccggctgcagcgagagacaaaggcgccgccaaatcccggaagccatcttgtctgctccagctgcgtgcctgattggacggttcccagcccagcgtgcctgattggacaacgtttaaggtcctgacccttcaggccctgagtgacagaagatgtgatcagacactgggctgagtgaagactgatagcctgcgctgcagccttttcagccggggcttcctcttttagctgagccaggcccatcccatagggtatttgtatttaaccttgtgtataaggtcatatacatttataaatgatatatggctactcacaaagaaaaataatataataataattattttagaatttcagactttatgaccttcctggcttctggtcctttgagtaggcagcctgagaattttaaaaagaggcaatcctcaaataaaatgtgagccacatgtgaattttaaattttctagtagtcaaactttaaaaagaaaaaaacaagtggaattgattgtaacaatctaacccaatatatccaaagtactatcattttagtatgagagcaatatgaaattattgatgaaatacacatatatatgtatatatgtgtatacacacacacacacacacacacacacacacacacatatatggaactaaatctttgaaaataactctattttacctaacacattgcaattcagaccagccacattccaggcacccagtagccacacgtggccaatagctgccacattaaaatgcagctctgatgtcaggggggtgaagaagagcctgaacatcccttttttgccagaggtgaggggacagcctctctctaccaacatctctcttcaattccaaggaaaaaacagttagtgaccatagaaagaacagaggacagatagaataaaataaccacaggtcgacctgtggttacctctggttattttattaactactgctgcccacctgttgctcaccttaattccaaacatcagacagtgaacaaagaatgatgaagccacaaaacaagaaaactctgtatcttcagatctgtccacagtcttaacctccaatgtttagatatggagaaaatagattaaaggcaaacttattttgctatttggccttggccctaacggtcagcctgtggttatctgttttctcctgtggtgtggtgaactgtgtgagtataagcaccaatcacacgcagacatgtctacatgtatttttgcattattcaatattctcttacaagacataagactttaagtcaagaataaaggtaatgtgagtcttttttcttgcattggcgctacccacagggtgcatcatgacatattgctaagttctgcattcaggttatgtggctctcttcttttacccaggcccagaatattttgcacaatagaacatattactaggcccaacatatataaaatgggaggcccttgcctgagccttttttacagagggccttgtgacatatctctgcatcaatcacctaagagatgcaactgtccatttttccctgcactctgcccacaggaaaaattgtgacttatcattaagcctaggtagcaggtgatgtgtctctcctgcctgggccttgagccacagaaagcattgttacctattgctgggctcagcacccaggtgatgtgactctgctgcctgtgtcctgctgtcaggagaaggttgtaacatattcctatttaggtgatgtgacactcctgtctggtccctgccctcagaaaatattgtgacatattcctggcccaagtatgagagtcaacatgtccttcgggaacacttcaggacctttaaccttgggtacatcatctcacaattcagaagggcccttccaaactcaggaatgagcaagtggctgttggctgtctaggttctccatgagttcacatttattactgaatttatgtctgcttaaatatcaggtttgtttcttcaatttaggtgtataacactgataactgaggggtaatcataggtaatctgacttgaatcacaaagtttattcaaatggcatatctaaaaaattttagtactggtttatttaacacaaaaatgtgtcagaggccaggcgcagtggctgatgcctataatcccagcacattgggaagccaaggagggcagatcacgaggtcaagagatcaagaccatcctggccaacatggcaaaaccccgactctattaaaaatacaaaaattagttgggtgtggtggcacatgcctgcagtcccagctactcgggaggctgaggcaggaaaatcgcttgaactggagaggcggaggttgcagtgagctgagatcacgccactgagactccagcctggtgacagagcatgactctgtctcaaaaaaaaaaaaaaaaagtggcagagtattttcctgatgttcaactatttttgtttttcctgaattagcagttttatgaatcagtgtgttctttagaattctcacaatccttacccagtccaaacaatataattttaaaattatcagaaacctgtactcaacttgtctgggctattttcatcttttcatgaatctccttacagacacagtactctaggattttgcatgtttttgaagtttgtagaaactacatcagaattaaaccattaactgtagaaatgacttcaaataattataaagaaacaaatgaaacaaacttattatgtctgtgacctgcaataacttatcataaccataattatgactaatagcttatactcagatatataagatttttagaaatttcataatattatgaaataaatgttaatatatattaaaatagaagttgaagaagatcaaacattatctttaattcaacaatgcttttcatgtaatttaacatatcaaataattacgttttttactcttttggatgttgcatagaccctctgtagcatccaaaagttaggggtctaggccgtgcccagtggctcacacctgtaatcccagcacttagggaggccaaggcaggtggatcacctgaggtcaggagtttgagaccagcctggccaacttggtgaaaccctgtctctactaaaaatacaaaaaattagctaggcgtggtggcaagccgctgtaatcccagctacttgggaggctgaggcaggagaattgcttgaacctgggaggtgaaggttgcagtgagccgagatcatgccattgcactccagcctgggtgaaagagtgagatgctgtctcaataaaaaagaaaaaaaaagttaggggtctaataatacataaaatttgtgttcaagagaaaattgttatactttttaattagtgtattatcaatggtaaagctaattttaataaaaccttacaagtaaattcatcaaatttgtcatttttggccaatctagatttccataaatatgttataatctctcataatcatttaaactttttatattttatttttatctactattttattttttcaatttgacacaaccattaagtaatttcaaactacactaaatgtttctaacttccttcatcaaaagcattttttgctttcgtttctacactctatgcagaattgtttttcgtacatctaattgatttaattatatataaatcacattaactctttttttttaagatggagtctagctctgtcacccaggctggagtgcaatggcgggatctcagctcactgcaacctctgcctcctaagttcaagcaattctcctggctcagcctccagagtagctgggactacaggcgcatgccactatgcctggctaatttttgtattgttagtagagatggggtttcaccgtgttagccaggatggtctcaatctcctgatctcataatcctcccgcctcagcctcccaaagtgctgggattacagacatgagccacagtgcctggcctcattaactcttaacaaccttttagtgaaattcctaggaagcaattttgaactgtttcagtatttgtagacaaaatttattttatattttaaataaatattttttaaatttttttaaaataacaaatctaaatatatttagcttttttatattacataaaaataagattctgatcaggcatggtgtctcatgcttgtaattccagcactttgggagaccaagacaggaaggctgtttaagcccaagaattcaagtccagctggggcaacatggcaaaatcccatgtctacaaaaaatacaagaattagctgggcatggttgcctgcacctgtaataccagctattcaggaggctgaggtaggaggactgcctgagtccagaaagttgaggctgcagtgatccatgatgaggctattgcaccccatcctaagtaatagagtgagaacctttctttaaaaaaggccaaagcacatgaacttaatgttatggggttttttttggtttattattattattttaatagttttgggggtacaggttatgtttggttacatggataagttgtttagtcgtaatttctgagatttgggtgcacccatctcctgagtagtgtacactgtatccaatgtgtagtctttcatctctcacccacctcctgcccttccacctgagtccccagagttctgtgtataattcttatgcctttgcataagagcttagctcccactatttggtttttcatttctgagttacttcacttagaataattgtctccaactccatccaggttgcttcaaatgccaatattttgttcctttcttgactgagtagtatttcattgtttgtgtgcgtttgtgtgtgtgtgtgtgtgtgtgtgtgtgtgtgtatatatatatagtgatatatatgcgtgtatatatataatgtgaaatatatatatatatatatatatatatatatatatatatgcacacatatatatcacatttctttatccactcattggttgatacgaatttaggctggttctgtatttttacaattgcaaattatgctgctgcaaacgtgtgtgcatgtgtctttttaatataatgatttctttttgtgtgtgtagatacccagcagtgggactgctggatcaaatgatagttctatctttagttttttgggtttttttttttttttgagacagattctcactctgtcacccagctggggtgcagtggcacgatcttggctcactgcaacctctgccacccgggttcaagggattctcctgcctcagcctcccaagtagctgggattacaggcgcctgccaccacgcccggctaattttttctgtatgtttagtagagacggggtttcaccatcttggccaggctggtcttgaactcctgacctcctgatccacctgcctccgcctcccaaaatgctgggattacaggcgtgagccacccctcccagccctacctttagttctttaaaaaatcttcatactgtttttctctagtggttgtactagtttacattcccaccagcagtgtaaaagtgcttttgtttcaccacatttctgtcaacagctagtatttttaaattttttaattaagaccattcttgtagtgtggggaaaagcaagagagatcagattgttactgtgtctgtgtagaaagaagtagacataggagactccattttgttctgtactaagaaaaattcttctgccttgagattctgttaatctatgaccttactcccaaccccgtgctctctgaaacatgtgctgtgtcaaactcagggttaaatggattaagcgttgtgcaagatgtgttttgttaaacagatgcttgaaggcagcatgctccttaagagtcatcaccactccctaatctcaagtacccagggacacaaaaactgcggaaggccgcagggacctctgcctaggaaagccaggtattgtccaaggtttctccccatgtgacagtctgaaatttggcctcctgggaagggaaagacctgaccgtcccccagcccgaggaaggcatctgtctcctgcccgtccctgggcaatggaatgtcttggtataaaacccgattgcacgttccatctactgagatggggaaaaactgccttagggctggaggtgggacaggcgggcagcaatactgctttgtaaagcattgagatgtttatgtgtatgcatatctaaaagcacagcacttgattctttaccttgtctatgaatgcaaagacctttgttcacgtgtttgtctgctgaccctctccccactattgtcttgtgaccctgacacatccccctctcagagaaacacccacgaatgatcaataaatactaagggaactcagaagctggcgggatcctccatatgctgaacgctggttccctgggtccccttatttctttctctatactttgtctctgtgtctttttcttttccaagtctctcgttccacctaacaagaaacacccacaggtgtggaggggcaacccaccccttcattgtaggagtaaggtggtatcacattgtggttttgatttgcatttccctgatagctagtgatgtttagcatgtttttatatgttttttggccatttgtatatctccttttgagaattgtttattcatgtttttagcttactgtttcatgggattttttttttctgattcttttgagttccttgtagattcagaatatttgtcttttgttggatgaatagactgtgaagattttctcccacttggcggcttgtaagtttactttgctgattatttctattgtggtcaagaaggtttctggtttaattaagtcccatttatttttctttgtttttgttttatttgcttttgggttcttggtcatgcactatttgcctaagccaatgtctagaacagtttttctgatgttagcttctacaatgtttacagtttcaagttttagatgtaaatattttctccatattgagttaatttttgtataagataagagatgaagattcagttttattcttccacatgtggtttgccaattatcccagcagcatttgttgaatagggtgtccttttcctaccttacatatttatttactttctcaaagatcagttggctgcaagtatttggctttatttctgagttcactattctgttctatttgtctgtgtgtctactttcataccagtagcatgttgttttggtaactatagcctggtagtatagtttgaagttaggtaatgtgatgcctctgattttttactttttgcttagtcttgctttggctatgtgggctttttttaggctctatatgaattttaggatttcttttcctaattctgtgaagaacgatggtggcattttgacaaaaactgacttgtagaatgctttcgtcagtatggtcatttttacaatattgacactacctatccatgagcatgggatatgtttccatttgtttgtgatatctatggtttctttaagcagtgttttgtaattttctttgtagatgtatttcacctccttggttaggtatatttctaattattttatttttttgcaggtttttgcaacgagttgagttcttgattcgattttcagcttggtagctgttggtgtatagcagtggtgccgatttgtatacattgattttgtattctgaaagtttactgaatgtattcattagatctagaagctttttaataaatctctagggttttctaggtataaaatcatgaattcagaaaacagtgacagcttgacttcctctttacagatttgaatgcaatttatttatttatttttattgtctaattgctccagctaggatttccagcactatgttgaatagaagtgatgtaagtgaccattcttgtcttgttccagttgtcaggaagaaagttttaatttttcctcattcagtataatgttggccatggatttgtcacagatggcttttattaccttaaggtatgtacccccgtgccgattttgctgagagtttcaatcataaaaagatgctggattttaaatatgtttttctcgtctgagtgtggtggcttatgtgtgtaatcctggcagcttgggaggccaagactggtgggttgcccgagctcaggagttcaagactagcctgggcaacatggtgaaactctttctttaccaaaatacaaaaaattagctgagtgtagtggcgcacacctgtacttttaattttagctacttgggaggccgaggcatgagaatctcttgaacccgggaggcagaagtttcagtgagccaagatcatgtcactgcactgcagtgcaggtgacagagatttcatctgaaggaaaaacaaatgttattctgcatctgttgagatgatcatatggtttttgtttttaattctgcttatgtgaggtatcacatttgttgacttacgtatgttaaaccacccctacatccctggtataaaatgcacctgatcatggtgtattattatttgatatgctgttgtatttggttagctagtattttgttaagaatttttgcatctatgttcatcaggaatattagtgtgtagttttgtgctatgttctttcctggttttggtattagggtgatactggcttcatggaatgatttaggaaagatatcctctttctctatttttgaaatagttttatttaggttggtaccaattcttccttaaatgcctcatagaattcagctgtgaatccatctggtcctggacttttttttttttttttggaaattttttattactgtttcaatctcactacttgttattggtctatgcagagtttctacttctttctggtttaatcaaagagggttgtacatttccaggaatttatccagctcctctaggtttcctagtttgtgcatgtaaaagtattcatagtagccatgaattatcttttgtatttctgtggtactggttgtaatatctcacattttgtttctaattgagcttatttagatgttctttcttcttttcttggttaatctcactaatggtctattaattttggttatcttttaaaaaacaaatttttgtttcatttgtcttttgtgctatttaaaatttcaattatgttaattcttctctgattattgtttgtttttttgtttgtttgtttgtttttgttttttgctgggttggggtttggtttgttcttgtttctctagttccctgaggtgtgaggttagattttcaatttgtgccctttcagactttttgatgtaggcatttaatgctatgaactttcctcttagcaccacttccgctgtattccagaggttttgataggttgtgccactactattgtttagttataaaaaaatttaaatttccatcttgacttcattgctgacacaacaattattcaagagcaggttatgtaatttccatgcatttgcatggttttgaggatttattttggagttgatttccaattttattccaatgtggcctgagagaatacttgacataattttgattttcttaaatttggtgagacttgttttgtagcctaattatatggtctattttggataatgttttatgtgctaataaatagaatgtatattcttcagttgttgagtagaatgttttgtaaatatctgttaagtcaatttattctagagtatagtttaaattcactgtatcttagttgactttctgtctagatgacctttctagtattgtcagtggggtattaaagtaccccattattattttgttgctctctatctcctttcttatgcctagcagaaattgttttataaatttgggagctccagtgttaggtgcatatggatttagaattgtgatgtcttcctgtttggactagttcttttactattatataatgttattctttgtttttttgttttgttttgttttttaccattgttgctttaaagtctgttttgtctgctatgagaatagctactcctccttactttttgtttccatttgcatagaatatctttttccatttctttgccttaagtttatttgagtttttatttgttaggcaagtctcttaaagacagcagatacttggttggtaattttttttcttcttttgagatggagtgtcactcttgttgcccaggctggagtgcagtggcacgatcttggctcactgcaacctttgcctctcaggttcaagcaattctcctgcctcagccccctgagtagctgggattacaggcgcacgccaccatacctggctaatttttctattttagtagagatggggtttcaccgtggtagccaggctggtttcggactcctgatctcaggtgaaccacccacctcggcctcccaaaatgctgggattacaggcgtgagccaccgtgcctagccataaatttttatttattctgccattctgcatcttttaagtagagcatttaggttattgacatttaatgttagttttgagatgtgaggtactgctgtattcatcaggttagctgttgcctgcatatctttgagtttttttgttattgttttataggccttgtgagacttatgcattaaggaggtactattttggtgtattttgaggttttgtttcaagatttagaagttcttttagcatttcttctattgctggcttggtactggtaaatcctctcaacacttgtttttctgaaaatgactttatctctccttcatttatgaagcttaccctcactggatacaacattcttggctaaaaattgtgttgtttacggaggctaaagacaggactccagtcccttctttcttgtagggtttctgctgagtaaactgtgttaatctggtaagttttgtttatagggtacctaatgcttttcctcacagctcttatgattcttttcttcatcatgaatttagataacctaatgactacatgaataggtgatgatctttttgtgataaattttccaagtgttttttgagcttcttgtgtttggatgtctagatcattagcaagacctgagaattttttctcaattattcactcaaataaaatttccaaacatgtaaatttatctttttgtttttttcaggaccaccaattactcctaggtttggtcatttaacataatcccaattttcttagaggctttgttcattttgttgattctttcttctttgtctttgccagactgatttaatctgaaagacttttcttcaagctctgaagttctttcttcaacttgttgtagtctattgtttaaactttccagtttattttgtatttctgtaagtgtgtctttcatttccagaagtggtgattgttttttaatttatagtatttattcctttggaaatttttaaattcatatcttgtattaattttttaaatttctttaagctggttttcttgttcctctggtttctctagtagcttaataatcaactttctcaatttattttctggcaactcagacagttcttcttggtttagaatgattatagaagagctagtgcaatattctggggttgttatagaaccttgttttgtcatattggaattacttctctggtttcttctcatttggctagactatttcagtggaaagatcttggactcaaaggctcctgttcagattcttctgtcccatgtagtgatttcttgatgtggtgctttctcacttttcctagggatgggctttctgcaagtcagactacagtgattgttattgttcttctgggactagtaaaccagtggagctctacagctccaggctgatattgaggaatgtctacaaagtgtcctgtgatgtaatctgtcttcaggtctctcagccatgaataccagcacctgcttcagtggaggtggcagggaagtgaagttgactgtgtgagagaccttggttgtagttttatttagtgcattggttttctcaattgcttgttatgcaagcagtgaatttgtcatgtggacagactcaggacctctggttagccaggatgttacaggtggtggaattagtttttctttttttttttctttggagcagggctgttctgttacgagtcgctgttatggcttgtgtcagttggcctccagccaaaaggtggtgctttcaggagaacaccagctgtggtagtagaaagggggtatagacttgccctagttaaccaggatacccgttcaggattctcaggtgatgggtgggaccatagatcttccaaaagttaatttattttgccttcggctaccaggttgagtagagaaaaatcatcaggcagaggcaggattagaccggtctgagctcagactctcagggggtgtggcttgctgcagccactgttggaggagaggtggttctcaagccaatggagttatgttttaagggaggttatggctgcctttgctgcttcatacagagcaccaagaaaagcgagaaaaagctggcagtggcaggcctcacccagctcccatgcagccagcaaggcctgtctcattccattcccaccctgtcctgccaaaagcatggagtttatatcaaggcagccagcgtgcagagttgagatcttgccccaggctacatgcctatccctgagaaagtcagaaaggctttcaggcttcacccctccccacctgcccacacacttagctgcacagcttctgtgcttatatctgcacttcctattcacttctgcagactctgcgcagtaaaatttatgcttggtcaaaattattgcacagttcactaaaagcttttttaatttttttggcccctccctaattctgctggctgcctttcacaaagacccttgtgagataaagtcaggtatgactcttttggtcatgagctggggactgggaatgcctatgggctctttccctggctgcttcttttatatttcactcagctccctaaattcatttcagctctaggtaaggttaaatacatttcctttgatctggatttttcaggtccccctgtggggatgtgtgttcaaaggtagactttctttctcttacactttggggaactcacagttcttcagctgtgtcacagagtttgcagtaacaagctgcttttttcaaagggtctgtgaaatcttttgttttttcttggtatgttcctgcagtggttatgtcagaggcgttcgaaacagagcaactccattttgagtgagggctacaaaaatgaggctgagacgtcgggcgcggtggctcaggcctgtaatcccagcactttaagaggctgaggcgggcggatcacgaggtctggagatcaagaccatcctggctaacacggtgaaaccccgtctctactaaaaataccaaaaaatagccgggcatggtgtcgggcgtctgtagtcccagctactcgggaggctgaggcaggggaatggcgtgacccgggaggcggagcttgcagtgagccgagattgcgccactgcacgccagcctgggcgacagagccagactccgtctcaaaaaaaaaaaaaaaaaaaaaaaagaggcttaggcttgctgggctgtatgcccagaaaattaggcattcctagcctctaaatgtttatggttaagggaacaaattaataatgtttaccaaacagactcagacttgggtgtgtccagatatcctgacatctggagaacaaaggcattcctaattttgctttaaagataataatatcgattctcacaaaatatagtaagaaaattaattatgtattacaaacccttgtagcagaacacatctccccacatatacaagcattgtacctagggggatgcattcttctcttactttcaggaacgtcctgttttgtctatggactagctgtcctttcaccactttactttcttaataaacttgcttttgctttgcactgcggacttgccctaaattctttcttgcgtgagatccaagaaccctctgttggggtctggatcgggacccctttcctgtaacatgtttctggtgaccacagaagggactatagtgcagaaaccctgacccaatggctacctttgcctaagtgttgaggtcctgtaacatctttctggtgaaccacggaagggacgatactaaagaaaccctccaacccaaaggaaataggctgcagcactgattggatgactttgggtaagtggtggggtacccggttaaagaataggattgggttagaggcccctcttaataaaaggaaagaatgcttgactgaccccgacgtcagacgcctgatttaggagagttagagtcccttctaaggtttagggacctcttggtaaagtccctctcagctgaaaacgggcttggcactgcaggctatgctctttgtattaatctgccttctccttgctgcatgaatcaatttcttgggtgctgtctctgtttcattgtcatgattttattttattttattttttagatgtgtctcactctgctgcccagtctggagtgcagtggcgcgatctcggctcactgcaacctccacttccagattcaagcagttctactgcctcagcctctcaagtagctgagactacaggcgcttgccaccatgcccggctgatttttgtatttttagtagaggtggggtttcaccatgttggccaggctggtctcaaactcctggtttcagatgatccgccggcctcggcctcccaaagtgctgggattacaggtgtgagccaccgagcccggtcttcactgtcattttcaggaaactttaactgatcttagggatgttaacttattctttttctgtgtgcctcctgatttccgtccgtttgcttgtgaaacattgggaacaaaaagcattgaaggctccgtctccaaaatggctaattgagatttagtatttaacagctatgagcaataaaattacatagatgtggttttgctttgttgctgctatagtgactaggcgtgatcgagaagcactaggatggaaatcagggaacttttctccttgctgttttgtttcactttgcacactaaaaatacaattctttcctttcttggattcaggcaaactggctctgcttgtttaatccacactgtcgctattgcccagaacctgcttgctctggtcattcccatctaaatcttcttcatttcctttgccttattcgacatttttgtcaaagtccatttgtggtttaagattcatggcttggccaggcgcagtggctcacgcctgtaatcccagcactttgggaggccaaggcaggcggatcacgaagtcaggagatcgagaccatcctagctaacacggtgaaaccccacctctactaaaaatacaaaaaattagctgggcgtggtggcgggcgcctgtagtcccagctactcgggaggctgaggcaggagaatggcgtaaacccgggaggcggagcttgcagtgagcccagatcgcaccattgcattccagcctgggtgacagcgagactccgtctcaaaaaaaaaaaacataaaataaaataaaataagattcatggcttggctcacttatgttagttggataatgtgaaacatgtttgatgagagaaaaagaagaaaaagagctagacatgcaagatgatcctttaatgcaagccccccccccgcccccgcccccgcccctggttcagcgtgcagttttgagtggagcagacccttctgtcacctctaaaggttcagatgtgtcggtcctttcttcctctagcccacctgaaagttctgttgataatccttcatctcctcttccttaccggactagtccctctctacacccaccactccctgaggaactgagcccaacgagtactactctagtggagctgcctatcaacctccaaagggaaatctgtccacttacagaggtggcaaatggggaagaaggcactgtgagaggacatgtccccttttctatgtctgatttggctctatgtaaagagaagtttggtcatttctctgaagatccaggaaaattcctagatgagtttgagaaattaactctgacctatagtttaactggacaggatctgcacattttgttgtctctgtgttgtacagtaaaagagaatgcattttggtgacagctagggcgcatgcagatgaggtattgtcttgaaacctgaaccataatatatatcaggcaggaggttcagcagttcaagatcaagatccacagtggaactatcaaagaggcagtgaggacttggggtggagagagaatatggtcacttattttttgaaagggatgaagaaatgtatgaaaaagcctgttgtgggaggccgaggcaggcagatcacaaggtcaggagatcgagaccagtctggctaagatggtgacaccccgtctctactaaaaatacaaaaaattagctgggcgtagttgtgggcacctgtagtcccagctacttgggaggccaaggcaggagaatggcgtgaacccgggaagtggagcttgcagtgagccaagatcgtgccactgcactccagcctgggcaacagagcgagactctgtctcaaaaaaaaaaaaaaaagaaaagaaaaagaaaaagtctgttgactataaaaaggttaaggaagtttctgagggcaaagatgagaatccaactttgttcaagggcgtttagttgaagaaatcgggatatatactaacattgatcctgcctcaagggaaagatgaaccattctgggagtacattttataacccagtctgcccctgatatccatagaaacctattaaaagcagctgtgagtccccaaacttctaaggaacagctgtggatatagaatttttagtttttaataacagggacaaagcagaggaagcagaaagtgcaagaaggacctcccacaagcacggctcttggctgcagccttaagctcacatcaaacatgggattgcctcctggctcttggcctgaacaagggaagctgaaaggtgggaagcccaaagctgggcatctgagtcaccatgctttgggcataaatcagtgtgcacattgtaagaaaactggccattggaaaagggattacccagcattctgaagggagccatcagcacccaaacccatgatggctgaaatagccaggcaagcccaagagcgatgggactgagaccttcagccacagctcctgttggacaactaactatatctatggaggagccttgggtaacccttgatgtggcaggtaagaatattacattccttctggaatgctaactctgttttgacccaccatgttttacctatcctttaagctgctcttcagactttgaatgccccaccccttgttgggaagggatctgttaattcagaataaatatcagtgatatggtttggctgtgtccccatcaaaatcacaacttgaattgtatcttccagaattcccacatgttgtgagagggacccagtgagaggtaattaaataatggggaccagtctttcctgtgctattcttgtggtagtgattaaacctcaccatatctgatgggtttatcaggggtttctgcgtttgcttcttcctcatttttctcttgctgccaccacgtaagaagtgcctttcaccttccaccatgattctgaggtctccccagccatgtggaactgtaagtccacttaaaactctttttattgccagtttcaggtatgcctttatcagcagcatgacaatgaactaatacagtaaattggtaccagtagagtggggcactgctaaaaggatacccaaaaatgtggaagaagctttggaactgggtaacaggcagaggttgaaacagtttggatggctcagaagaagagaggaaagtgtgataaagtttgtaacttcctagagacttgttgaatggctttgcccaaaatgctgatagtgatatggacaataaggtccaggctgaggtggcctcagatggggatgaggaacttgttgggaactggagtaaaggtgactcttgttatgttttagcaaagaggctggtggtattttgcccctgccctagagatttgtgaaactttgaacttcagaaagatgatttagagtatctggcagaagaaatttctaagcagaaaagcattcaaggggtgacttgggtgctgttaaaggcattcagttttacaagggaagcagagcataaaagtttggaaaatttgcagcctgactatgcaatagaaaagaaaaacccattttctggggagaaatacaagctggctgcagaaatttgcataagtagcaaggagcctaatgtaaatccccaagaccatggggaaaatgtctccaggccatgtcacagaccttcatggcagcccttcccatcagatgcctggaggtccaggagcaaaaaatggttttatgggctggccccagggttcctgtgctgtttccagcctaggaacttggtgccctgtgttccagctgctccagccatggctgaaacgggccaatgtacagctcgagctgtgcctttagagggtggaatccccaagcctcagcagattccatgtggtgttgagcctgcaggtgcacagaagtcaagaacagaggtttaggaacctctacgtagatttctgaagatgtatggaaacccctgaatgcccagatgaaagactgctgcaggggcaggcccctcatggagaacctctgctagggcagtgtggaaggaaaatgtggggtcagagcctccacacagagtccctactgaagcaccatctaatggagctgtgagaagagggccaccatctttcagatcccagaatggtagatccaccgacagcttgcactgtgcacccagaaaagccacagtcactcaacgccagcccatgaaagcagcaaagagaagcccgtactctgcaaagccacaagggtgtagctgcccaagacaatgggaaaccatcttttgcatcagcataatctggatgtgggacatgaagtcaaaggagatcattttggaactttaagtatttgaccaccccactggatttcggacttgcatggggccttcagtccctttattttgaccaatttctcccatttggagtggctacatttacccaatgcctttactcccattgtatctaggaagtaacgaacttgctttgattttactggctcataggtggaagggacttctctggtctcacatgagaatttaaactgtggacttttgagtttatactgaaatgaattaaaacttcaggggacaggccgggcatggtggctcacgcctgtaatcccagcactctgggaagccaaggcgggtgggcggatcacgaggtcaggagattgagaccatcctggctaacatggtgaaaccccgtctctacttaaaatacaaaaaaattagccaggcatggtggcaggtgcctgtagtcccagctactcaggaggctgagccaggagaatggcatgaacctgggaggcagagcttgcagtgagcagagatcacgccactgcactccagcctgggcgacagtgctagactccctctcaaaaaaaaaaaaaaaaaaaaaaaacaactttgggggactatttggaaggcatgacgggttttgaaatgtgaatgtatgagatttgggagagaccaggggcagaatgatatagtttggctctatgtccacatgcatatctcatcttgtagctcacataattcctccctcttgtggaagggacccagtgggagaggattgaatcattgaattgtagatgattgaacagcatcttttctgtgctgttctcatgacagtgaatgggtttcatgagatctgatggttttaaaaacgaaagtttcttttcacaagctctctgtctgctgccatccatgtaagaagtgatttgctcctccttgccttccatcatgattgtgaggcttcccaagccatgtggaactgtaagtccaataaacctccttcttttgtaaattgcccagtcttgggtatgtctttatcagcagcagcataaaaatggactaatacattaatttatattttatttagttagaacattccattttcatttattaattggagaaccctacatgagcctacatttctttagttattgttcctttcactttttataaatgacataagtaaatttattgattgattgggccaatttgttcaggtcagtactagggagacttcataagtcatgaggatgtttctatacataaatgcagcaaacaaacatgacagggcttgctgtgtcacagatgctttataatacaccataaatattcctgctggagttagtttgtaacttcaagtcagggatggaaaatagcaatggtgaagaaataacatttattcttcatgtggagaggacatgttttccaggctgcaaagctgactcttgctgaatttaaagatcaattctgcctttttcctttcctaattattctcagttttgtttgtcttattatggggattccaagaatgtatgcatcacagcccttctttatttattgtgtattggtgacagttttctcactgttgtctttatgccatgacattttacatggtactttgtaggttctaatttaaaagttggtactttttattgcacagaaaattgattttaactagaaaatttatttagcaatgtaactttcagattagttaattaaaataagaggcatatactgtccacaggtgagaaaattacatcagttagcattgtttttctttgtttgtcaaagaaaactcttattcaattcttttttttttttttgagacagtctgactctgtcacccaggctggagtgcaggggtgaaatctcagctcactgcaacctctgcctcccaggttgaagcggttctcctgcctcagcctcctgagtagctgggactacaggcgcgtgccaccacgcccagctaatttttgtatttttagtagagacagggtttcaccatgttggccaggctggtcttgaactcctaacctcgtgattcacccatgtcggcctcccaaagtgccgggattacaagcataagccactgcacccagcctacattcatacacaaattctggcaaatataaaatttgtgagatactatatctttgaaattagacttttgagagggttaatgatacataattgttttaaatttttattttattttattttattttggagagggagtctcaccctgttgcccaggctggagtgcagtgatgtgacgttggctcaccacaacctccgcttcccggttcaagcaattcttctgcctcagccttcaaagtagctgggacaacatgcgtgcaccaccatgcccggctaatttttgtatttttagtggagacggggtttcattatgttggccaggctggtctcaaattcctgacctcgtgatccacccacctcagcctcccaaagtgctgggattacaggcatgagccaccctgcccggtcaatgatacataattttaaatttaattttgctgtgatatacttacagcacaactttctttttttctttctttcttttttttttttgagacagagtcttgcactgttgcccgggctggagtgcaaaggtgtgatctccactgactgcaacctctgcctcccgggttcaagcgattctcctgcctcagcttcccaagtagctgggattacaggtgcctggcaccacgcctggctaatttcttgtatttttagtaaagacagggtttcagtatgttggccaggctggtctcaaactcctgacctcatgatccacccacctcggtctcccaaagtgctgagattacaggcgtgagccactgcgcccgacccaacttacatctttatgcagagtcttctgtttttacgtgtgaatgttaaatgttgcacaataataaaatgagctctgtggatatgaaatttagaataatatttctttcacatattgctataacaatatgaagaaatttctcactcttattttatataattttttctgtgagtgaagttcagtctacagtttttactgatagtcacctaactgtaggtatctccttggtcactggtaagtgactgattagtaatgccaatctatttcattttagtcactaagaaaacaatattttaaaattttcaatagaaaaaagtattattatattattgtttctgaaactttcagacactgtagaccattcaatcaataatgatgttgatgtagacaacaaattgtctatataattataagctcattttagcttttaatgtaaaaattcagtatattttataagcaaaattagcagctcttttaaatcactagagaaatattgttgttggaatccatttaccaaagtatttgtgttaggcttagtaatgagtactttaaaccaaaaatcaagttctacatactatctaagggttaaaaaaaaagtggtttttaagtttctatttatttctactatattataaaattcaaagccgaaatgttaggtcaggaatgaaagcaagaattggatatgacggtgctgggcacaatggttaagactgaaacttggtatcaggtggttcctgattgcattttgtctgccacttgtgggctgtatgacctgaatacattttcatgacctctctgtgcttgactcttcagttgcacagtgaggataatagtgcctaaattctagggttttgtaaaattaaggcaactaatgctgataatgatgccataggtacaccaaccacatagcaagtgtacagaaaatttattcacttttatttgttaattgttacatcataataaatgttaagcctgaaaaacaggtggccacatcagtgatttgcaacccatgtttattctttttttttttttgagacagagtctcactctgttgcccaggctggagtgcagtggcatgatctcagctcactgcaacctccgcttcctgggtttaagcaattctcctgcctcagcctcccaagtagctgggactacaggcacctgccaacacgactggctaattttcgcagttttagtatagaaggggtttcaccatcttggccaggctggtcttgaactccagaccttgtgatccatccacctcagcctcccaaagtgctgggatcacaggcatgagccaccacgcccagccacccatgtttatactaatcagccagtcttgggctataatggtagttagatttattttattttatttttgagacagagtctcgctgtgtcatcaggctggcgtgcaatggcactatcttggcttaccgcaacctccgcctctcgggttcaagcgattctcctgcctcagcctcctgagtagctgggattacaggtgcacgccaccacgcacggctaattttgtagttttagtagagatggggtttctccatgctggtcaggctggtctcaaactcccgacctcagttgatctgccctccttggcctcccaaagtgctgggataacaggcatgagccactgcacccggccagtagttgagtgcttttaatgctacccttggaaaattcccatatatttacatatatcacggatataaatattataaaaagatttctcattgagtattgctctttagcactccagtaacactagacaaataagcagttaaggccgggcatggtggctcacgcctgtaatcccagcactttgggaggcagaggagcgcagatcacgaggtcaagagatggagaccatcctggccaacatggtgaaaccccatctctactaaaaatacaaaaacttagccaggcgtggtggcacgcacctatagtcccagctacttgggaggctgaggcaggggaattgcttgaatctgagaggcggaggttgcagtgagtagagatcgcaccactgcactccagcctggtgacagagggagactctgtctcaaaaaataaaataagttaaataaataaataaacataagcacttaaatattgagcatttgctagttttaaaatgaaagtaggcaaattgtttccttacttatttaataaatttctaattgccaagtacctatgtttatttgaaaaattgaaatgtagtgtaaaaatatatttaaatacctttatttcctaacaaataaaagaaatcatttatttagagagaattttactctaaacaattgctttagagtgtgtcttttaaagtattatattattttgaacattaaaaataaagataatgggccaggtgcagtggttcacgcctataatcccagcactttgggaggccaaggtgggcaaatcacctgaggtcaggagttcaagactagcctggccagtgtggtgaaaccccatctctactaaaaatacaaaacattagccgggcgtggtggcacatgcctgtaatcctagctactcaggagtctaaggcaggagaatcgcttgaacccgggaggcaaaggttgcggtgagccgagatcgcgccattgcactccagcctgggcaatgagcaagactctgtttcaaaaaaataaataaataaataaataaaaataaagataatttattcctgactactgggttcagactattcataatactagaagttttctcatctacatcactcattcagtaagccatttcaaagaacaaaaatacttacgttttctgaaattttaagattgaaaaacactgttttctctggcctaatttctttttttttctcttttctttttcttttttttttttttttgagacacagttttgctcttgttgcccaggctggggtgcaatggctcaatctcactgcaacctctacctcccagcttcaagctattctcctgcctcagcttctcgagtagctgggattacaggcatgcaccaccacacccggctaattttgtatttttagtagagacagggtttctccatgttggtcaggctggtctcgaactcccagcctcaggtgatcctcccacctcggcctcccaaagtgctgggattacaggcgtgagccaccatgcccagcatctctggcctaatttcttaaaatttacttctcaatttttaaaaataatgtattaatagtatttttgattggcaaattatagtcgtatacattgatagtgtaaaatgtgatgttttattttatgtatacaatataaaatgattaagtcaagttaaataaaatatctaacaacttgcttacctatcattttttgtggtgagacatttgaaatttagttattttgaaatttacaacacatgattgtttactatagtcaccctgctgttcaatgtatgtcaaaacctatttaccctgtctatgtgaaactttgtaccctttgataaacaatctgtatttctttctttctttcttttttttttttttttgagatggagttttgctcttgttgcacaggctggagtgcaatggtacaatttcgactcactgcaacctctgcctcccgggttcaagcaattctcctgcctcagcctcccaagtagctgggattacaggcatgcaccaccacacccggcgaattttgtatttttagtagtgatggggtttctccatgttggtcaggctggtctcgaactcccgacctaaggtgatctgcccacctcagcctcccaaagtgctggggttacaggcatgagccgctgcgcccggccacagttctctatttctttcccaccaccctcaacctctgataactattattccactttttgcttttttgagttaaactttcttaggtttagtatataaataggccgggcatggtggctcatgcctataatcccagcactttgggaggccaaggcgggtggatcaggaggtcaggggtttgtagaccagcctgaccaacatggtgaaaccccgtctctactaaaaatacaaaaaaattagctgggcgtggtggcgggcgtctgtaatctcagctactcaggaggctgaggcaggagaattgcttgaacccgggaggcggaggttgcagtgagccgagatcacaccactgcactccagcctgggcgacagagcaagactctgtctccaaaacaaaacaaaaaaacaaacaaacaaaaatataaataaattatgcagtacttaacctatttgtgtctggcttattttatgtagcataatgccttctaaatttatctctattgattcaaatgatgagatttacccacttttaaggctgaatagtgttccattgtttatactacatttttagaagaattaatttaatatatatttatctgttggtggaaaaactcatgttatgaaataatatttctatgttaaagcatgttagtgtaattttcagcctataaatatcttattaaaagtagctaatttatacagagcactaattgtaacactatgcatgtgttactgaattcaattttcacagtaacttaataacataggtcttattattattctcattttacagaggaagaaacagagccactgagagaaaggacttggtcacactagcaaagccagtattaaaacacaaacagcggccgggagctgtggctcatgcctgtaatccagcactttgagaggccaaggtgggcgaatcacgaggacaggagttcgagaccagcctgaccaacatggtgaactcccatcactactaaaaatacaaaaattagctgggcatgatggcaggcacctgtagtcccagttactcaggaggctgagacaggagagttgctggaacccaggaggtgaaggttgcagtgagccgagatcatgccactgcactctagcctggtgacagagcaagactccgtcaaaaaaaaaaaaaaaaaaaaaaccacaggcagcttggtatccagagataaccctcttcagtacaacaataaaaactctcttcaagcagaaaagacataattatttttaacactcatttttaataaacattttacaaaaattaaataattggatgcatttttattgttctatgtgtgtattagtatataaaatggtacataaaaaaataagccagaaaacaatagttaatatttgcaataaatataactggaaagtagttaactatcatttgcagatgatatctttgtttactgagataataaaagcaactgaaagacttttaaaagtctattcagggccgggcgcggtggctcacgcctataatcccagcactttgggaggtggaagtgggtggatcacctgaggtcaagagtttgagaccagcctggccaacatggtgaaaccccgtctctactaaaaatatttttaaaaaaaccaattagccgggtgtggtagtgggcgcctgtaatcccagttactcaggaggctgaggcaggagaattgcttgaacccaggagatggagattgcagtgagccaacatggtcccactgcatgcactccagcctgggtgacagagtgagactccatctcaaaaaaaaaaaaaaatgtccattcaggtgggaacaaaaaattctaagattatcctcaagattatcagtttgttgtacacctgtaatctttcattttcttgcaaaaaaatgtgtgactgtggtgggaaatcacccatgaaattaggttactattgggtaaactaaatcagaggtgcttttatatattttattttttttattttactttatttatttatttagagacggagttttgctcttgttgcccaggctggagtacaatggtgtgatctcggctcaccgcaacctctgtctcccagattcaagcgattctcctgcctcagcctccctagtagctgggattacaggcaggtgccacccacacccaactaattttgtatttttagtagaggcagggtttctccatgctggtcaggctggtctcaaactcctgacctcaggtgatctgcccgcctcggcctcccaaagtgctgggattacaggcatgagccactgtgaccggccagaggtacttttaatagaaagagacacatcatagaaaaacactccttgacctggaagtaagtgacttccagctgggccatgttgtaatctgctcatagtggccacatggaaggaaatatatttgtatattgtcattgtatctgcctcctacatgttgcttcaagtagggagaacaggaggatcccatggaagaggaaaaaaaggaggtctcatttgtgtgagaaataatcacctctaatctggaatagcttatgataaatagaagagaccacaacatgaccacatcaatgagagaaaaaaggcaacctggttaaaagtgctcactggcatttttaggcagcatttagtaaggcttagtgaatgatcagcctctggaataccaacagtctaccagcaaggctgaactcattctggttaaatcagcattctagtggcccagttttacactattcattacagaaatactgtggagatgagtgggtaccctgctagaattggccttattatgaaaaagcatacctaattatttgttttcacaatttaaaaaccttgaaaatgaccaggcgcagtggctcatggctgtaatcccagcattttgggaggctgaggcaggtggatcaagaggtcaggagttcaaaaccagcctggccacgatggtgaaaccctgtctctactaaaactacaaaaattagccaggcacagtggcaggcacctgtaatcccagctactccagaggctgaggcaggagaattgcttgaacctgggaggcagaggttacagtgggccaagatcacatcactgcactccatcctgggtgacagagtgactccatctcaaaacaaacaaacaaacaaacaaaaaaccttgaaaacatcatgaatttattaaaaatgtacttctgctaattgtggagcattctacaatactgtaatataatattgaactttaagcaccttaatatgaatgtttcttgaatgcatgaagagttatgtagatggtttcttttaaattaacatgagagaagtaatagagaaaagatttgaagtggaataaataatctaaaacacatttttttcaaaggcttggcataattactatgctttttgaaatggccatattactaaccagaagcaaaaacaagatttttgtttttctcagtcagtatgtttttgatcttttgaaatttaaaatcctggctaaaggatttgattttagtaagtggcttactaaagtattcaaggcaatacaaggataatttttataggtaggaaaatgcatactatatacacacattgctcttccctgtttgctttttttttttttttgacatggagtcttgctgtgttcctgaggctggagtggagtggcgctgcaacctctgcctcctgggttcaagcaattttcttgcctcagcctcccgaatagctgggattacaggcacacaccaccatgcccggctaatttttgtatttttagtagagatggggtttcaccatattggccagggtggtctcaaactcctgatttgagaccgcatccagccctctgacttgctttaacattgaaagactgcagattgcaaatctagtctcttgatttagagtaaattaacaaaagacttatttttcagccaaataattgtataaaatcaatgggtagggtcgagcggtggctcatgcctgtaatcccagcactttggttggctgaggcgggtgaatcacgagatcaggagttcgagaccattctggccaacatggtgaaaccctgtctctactaaaaccacaaaaaattaactgggcgtgtggcagcatctgtaatcccagctactcgggaggctgaggcaggagaatcacttgaatccggaaagaggagtttgcagtgagccgtgatcatgccactgcactcactccagcccaggtgacagtgtgagactccatctcaaaaaaaaaaaaaagggtaacagatgcccagatgccattatcagccaaaaaaaataatatgactagatttagtaagtatccagccatgcaaataacagcccaattaaattaagaccctaataagtgcatgtggaaagcatacatgtgcagcatggtgcacatccactcagcacctgcttctgcctctttagagatataccaattttccctgagtgactcagagtgactactaggaactgagaattctgtgttcagagggattactggaaacatggttaatacacttttttaatattataataaaattttatgaatcttactctgcctcacagtcttttagtaaaaaattgtttatatatagtactcaatttggattcatggaaaatttcaatattccaggtaagtcagacacacttaaatgtcaaccaaatttcataaaacatattcgagtcagattcaaatatgtttactcatattacctgggaatcaaaactgagagaagaataacttatttgttaaagttagagatgtagggaagacccactacttttgaccaacatctcctccacccctaaccacaggcaattatcattctactcactgtttctatgaatttgattttttaatattctacacagaaatgagattatgtgatatatttttattctgtgctggcttattttacttagcacagtgtcctccaggttcatcaatgttgcaaataagacttccttctttttaagggctgaatagcattccattgtgtaaatataccacattgtctttatccattcatctgttgatggacacttaggttgattccataacttagctattgtgagtaatcacttcctactctttcatttgtttgtatatcttttctttccttcctttgttatttctagaagtattttaatattaaaatataaattacaactctcaaataacttcatttctatgcctcctattggttaatattttggctgactgaacaaataagattttttaaaattacttggaacaaggccattacttcgtatttaacataatttgagaaaaaacagtaatgaaaatcaacactgattagtgaaacaatgattatctagcccctggtaataattttctctcccattcatcataaaagctgtctttgtgtcatctctcctagttgtaagaaagaggcttctgatccaattggtcagcataaaatattgtaaaatttaactttttggtcccaaaattaagctgctttttaacagaaaagttgatttttatatgtattattttattgtattatatttaaattcttcagcaaaactaaacaacacatacatttaaaattctctgaaaattaaaaatgcttaagaaacatttttatagaaactaaatctaaaataattttagattcttagagaacatttctcaaatacttcaagttctcctgttctgacagtagctatatatttttccatattgctataatagagctttggctgttctttgtggctaaatccaccatttctattctattttgttgtgtagtatttacgttatgcattttacattttaaaagttgtagtccatgcaatgcaattttaaacaattgacaaacattttttcatgtaaaattctgtgcttattcagcagtcactttattttcactcttcaaaggcattctaactgcctgaaaagcaaagtgacagttcaagtgagtgtgctgagctggaatgttgcaggaagtcagggaccccaaacggagggaccagctgaagccatggaagaagaacgtggattgtgaagatttcatggacatttattagttccccaaattaatacttttataatttcttatgcctgtctttactgcaatctctaaacataaattgtgaagatttcatggacacttatcacttccccaatcaatacccttgtgatttcctatgcctgtctttactttaatctcttaatcctgtcatctcctaaaccaaggcggatgtatgtcgcctcaggaccctgtgataattgcattaactgaacaaactgtagagtatgtgtgtttgaacaatatgaaatctgggcacacaccttgaaaaaagaacaagataacagcaatgtttaggaaacaagagacataactttaaactctgacagccccagtgagccgggcggaacagagccgtaggagccgggtggaacagagccgtagttctcttctttcaaaagcaaatgggagaaacatcgctgaattctttttctcagcaaggaacatccctgggaaagggaatacacgcctgggggtgggtctctgaactggcccccttggcgtggccgtcttctatggtcgaggctgtaggggtgaaatagaccccagtctcccatagcactcccaggcttattaggaagaggaaattcctgcctaataaattttggtcagaccggttgctctcaaaaccctgtctcctgataagatgttatcaatgacaatggtgcccaaaacttcattagcaattttaatttcgcctcggtcctgtggtcctgtgatctctccctgtctccatttgccttgtgatattctattaccttcggaagtacttgatgtctgtgacccacacctattcgcacactccctccccttttgaaagtccctaatagaaacttgctggttttgcggcttgtggggcatcacggaacctaccgacctgtgatgtctcccccggatgcccagctttaaaatttctctcttttgtactctgtccctttatttctcaagccggctgtcgcttagggaaaattgaaacgaacctacgtgactatcggggcaggttccccgatactggaactctccagtgtcagtctattcacattcatacaggtgatcttctggtgagagtggacttcgacagcaatatcacagcaatgtggaacagatgtaataaaataaaagatgaaacactgcttttcaggaaaatgagctaatctttcttactctgtgtatgtgattatgtgatggttgtaagttttaaaataaagactaggccaggcgcagtggctcacacctgtaatcccaacactttgggaggctgcggtgggcagatcacgaggtcaggtgttcgagaccagcctggccaacatggcgaaaccccatctctattaaaaatacaaaaaaaaattaggtcatcgtggtgggcgcctgtagtcccagctacttgggaggctgaggcaggataatcgcttgaactggagaggtggaggttctctctgtcacccagggtgtagtgcagtggcataatctcaactctggggttcaagccttcgtctcccaggttcaagcgattctcttccctcagtctcccatgtagctggaactataggcacgtgccactatgcctggctaatttttgtattttcagtagagacagggtttcaccatgttggccaggctagcttcaaactcctgacctcaggttatccacctacccactttggcctcccaaaatactagcattacaggcgtgagacaccatgcctggccattgcgtgctttttttttttttttttttgaaatgtagtcttgctctgtcacccaggctggagtgcaatggcacaatctcggctcagtgcaacctccacctcccaggttcaagcaattctcctgcctcagcctctcaagtagctgggattacaggtgcccgccaccatgcctggctaattattgtattttttagtaaagatggctttcaccacgttggtcaggctggtctcgaactcctgacctcaggagatccacccgcctcagcctcccaaagtgctaggattacatgcgtgagccactgtgcccggcctaacatccctctttttaaacaaccagttattctctttagaacaaaaatttaccatacaagatcctttcttatatacaagctgtttgtctatgtaatcttttttgcatagctagggtgtgacatattaccaaacccaatatgaagtcttagcagactcagtgattatagactatcatccctgctataaagataataattaagcaatatactacagcaattgagattctttgtttgatactccactctggggggtgctacagtatataatcccactgcaaaaagtaaagtgagtataacaattccctgcccagggcagtggttcacgcctgtaatcccagcactttgggaggccgaggcaggcaaatcacctgaggtcaggagttcgagaccagtctgaccaacatggagaaacctcgtctctactaaaaatacaaaattagctaggcatggtggcgcatgcctgtaatcccagctacgcgggaggcaaaagcaagagaattgcttgaacctgggaggcagagtttgcagtgagctgagatcgtgccattgcactccagcctgagcaacaagagggaaactccatctcaaaaaacaaaaacaaaaacaaaaacaaaaaaaagacaattcgcacaagggtggtgtagtagataatttctatctaaaattttattcaccaatttatagaatttcccttttggggtctatgaagttacaaatgtaatcccataaataatcaaaatttccctgcaaatatgcaccaaaaagaagttataatagttgatggcaaatcttgagaggaaaggtaggaatgactgaaagtatttggtaaggtaagaatgggactgagtagaaggagtaggcctcacttatgtactcatcttttataatttttatatttcttcacattaatatctgggactttcctctaggctgttcagggttgctccctcagctttccaggtttaactgagtatgatgtatccaagagtcaattcctgtaactttcattgcaaacagggttcaaagaagaacagtgaaaggtccttcccagtttgcgcttagggagggagagagagagaggggagagctttcaccaatatcaaatctgggctaaatgaaggtgttcttattttctggggttgagactctgctaaatgtgttaattcctgctgaaagtgagcaagagaggttacatgcttaaccaattcagaggtttcctggtctaatagaaaccattgtaagaaaaggccattcatacagcatcttgaaagggctcagacctaactttgaaggggtatttcttacttgcagtaaagccatggaaagaaaagtaacccaagaaaggtgagttttttggggacagttttttttttttttttttttgagacagagtttcactcttgttgcccaggctggagtgccatggcatgatctcggctcactgcaacctccctctgcctcctgggttcaagcgattctcttgcctcagcctcccgagtagctgggattgcaggaatgtgccaccacacctggctaattttgtatttttagtagagacagggtttctccatgttggtcaggctggtctcgaactcccgacctcaggcgatctgcctgccttggcatcccaatgtgttgggattataggcgtgagccactgcgccctgcctgagactgggctatctctcaaggttatgctttccagccctcaggatggccacagtcagataggtattaggcccatccggcctaatacatgttttaacatagaaatatcttcccataatatacaagtttttcaaagaatagatgaatgtatttaaattaactttttaaaatgtagcatagattcacaatggaatactattcagcctttaaagacaagatgtcttttaacaatattatttgtcttctctacctttcctgagtactgggatctttaagcacaatggagataatactatattcctagtgcttttgagacccactgtgtgatggctgccttaaatgaggtgccattgtcactttggaggtacttaggtagacaaaagtcggtagtaatttcattaattaacacttttattaccgcagaggtcttttctgtatggcatggaaatgcttctacccaatttgtgaaagtattaattccaggaggtattgcatgccctctgtctttggcatgtgggtaaagtctatctgtcagtcttttcctggttagcttcccatcctttggatttgagaagaaagaagtggcctgttgagattatctttaagacagactttgcaagcattaacctgtttgactgtttttaatagactctttcctggccgggagcagtgggtcttgcctgtaatcccagcactttgggaggccaaggcaggctgatcacgaggtcaggcattcgagcccagcctcgccaacatggcaaaaccccgtctctactaaaaatacaaaacaaaaacaaaaacaacaaaaaccaaaaaactagccaggtgtggtggcgggcgcctgtagtcccagctacttgggaggctgaggcaggagaatcgcttgaacctgggaggcggaggttgcagtgagccgagatagtgccactgcactccagcctgggcgacagagtgagacttcatctcaaaaaaaaaaaaaaaaaggtatttcctgaaaacaatctctgaggacactgacaaattttattctttcccaagtaaaatgtttgatggattttaaagacttttccattggctggaggctggcaagtggaatttgccattctctgactgtggccatcctgagggctggaaagtgtacccttgagagatggtccattttatcttttcaggactactaaagcttaatttcttttatggagccttcatagattagaggggtttcaagtgtgttgatgcctggaggcttcattgtaactgactaggctgcctgattagctaacttgtttctttccactattttatctgttccctctgaaggggtgggttgcccctccacacctgtgggtgttacttggaaaagaaagagacacagagacaaagtatagagaaaaaaaagggggcccaggggaccagcgttcagcatacagaggatccacgccggcactggcctctgagttcccttagcatttattgatcattattgggcatttcccagagaggggcatgtggcaggataatagggtaatagtggagagaaggtcagaaggtaaacacgtgaacaaatgtctctgcatcataaacaaggtaaagaaaaaagtgctgtgcttgtgatgtgcatatacataaacatctcaatgccttaaagagcagtattgctgccagcatgtcccacctccagccctaaggcggttttcccctatctcagtagatggaatatacaatcggctttacaccgagacattccattgcccaggaacgagcaggagacagaagccttcctcttatctcaactgcaaagaggcgttccttcctcttttactaatcctcctcagcacagaccctttacgggtgtcgggctgggggacggtcaggtctttcccttcccacgaggccatatttcagactgtcacatggggagaaaccttggacaatacctggctttcctaggcagaagtccctgcagccttccgcagtgttttgtgtctctgggtacttagggagtggttgagattagggagtggtgatgactcttaacaagcatgctgccttcaagcatttgtttaacgaaacacaacctgcacagcccttaatccatttaaccctgagttgacacagcacatgtttcagggagcacagggttgggggtagggttacagattaacagcatatcaaggcagaagaatttttcttagttacagaacaaaatggagtcttagcctatgtctacttctttctacacagacacagtaacaatctgatctctccttcttttccccacaccttctgatgtctcttacattgctatttcttatggaagaaaaactgagaaaaataacctgttaattttatgattgtctccattttccattggctttttgcactcctaatattggagtggtgcaggggctgttacagggtttgaggaggccctgcattttcagattaataatggcttctagtcctttcctagcctctggctttagcggatattgttgctggttaggaaaaaaggtgggatccttaagatgggtctggactggcctagtagttatagtttggcatatttttccttgaagtgcccatacttttggattaacattagcttccaccagggaaagacaaagagtttgttccagggcttattataaagatgctgaccccatgttaactaaaatttctctacctaaagagtgggactttctggaatgattaacacacttgaataaacctttcggtttttgttttgttttgttttgttttttctgagactgtcttgctctgtcacccaggctggagtgcagtggcatgatcttggctcactgcaacctccatctcctgggttaaagcgattctactccctcagcctcttaagtagctgagattacaggcacccattaccatgcccacctaatttttgtattttcagtagagacagggtttcactatgttggctaggctggtcttgaacttgcgacctcagttgatctccccacctcagcctcccaaagttctgggattacaggcataaaacaccatgcccggatagaataaaattttaaaatagtctttttgttgctgttgttatctaagtaaacaaagatatcacctgcaaatcataattagctactttataattgtacttattacaaatattaactaacttatcttttttcggcttaaattttttatgtaccattttatacattcacacacatataaaagtgaaaacatattcaatattcaattttttgttaatctttagtaaaaatgagtgttaaaaatattttttttttgaaggatttttattgttgtactcaagaatgttatctctggaggcaacattgcctgtattttaatattaactctgctattgtgagcaagtaatttctctctgtgcctctatttcttcctctgtaaaatgagaataataatacctatgttattaagttactgtgagaattaaattcattcacatatagtgttatagttagtgctcagtaaagattagttattaataaaatatgtacatgctgaattaaattaagacttccttttttgagatggagtttcactctttttgcccaggcaaatggagtgcaatggcacaatctcagcacactgcaacctccgcctctggagtcaaccgattctactgcctcatcctcctgagtagctgggattacaggtgcccaccaccatgcccggctaattttgtatttttagtaaagacagagctttaccatgttggccaggctggtctcgaactcctgacctcaggtgatctgcctgccttggcctcccaaagtgctggatttacaggtgtgagccactgcgcctggcctaatacatgttttaacaaagaaatatcttcccataacacacgagtttttcaaagagtagatgaatatatttaaattaactttttaaaatgtagcatagattcacaatggaatgctattcagcttttaaaaagggtaaattccaacatttagacaaataaagacaaatactgcatgatctcatttatatatagaacaaaatttaactcaaaagagtagaaagtggattaatggttaccagaggctatgggtagtgaaaaggaaataaaaagttgtggatcaaaaagtacaaagtttctaatagacagggtaaataggttttgagatctgttgcacagcagcatgatcatagtaaacaataatgcattgtatatttcaaaataactaagagtaaatttcaaatgtctcaccacaaaaaatgatatgtaagcaagttgatagatatgttatttaacttaatcactccatctatttatctatctatctatctatctatctatctatctatctatctattcctttttgtggagaacagggtctcgctatatttcccaggcaggtctcgaactcctgggctcaagctatcctcctgcttctgcctccctgagagctgggattacaggcgtgagccaccatgcctcgcaatcactccatattatatacatatattcaaacatcacatttaccctataaatgcatagaactctgatttgccaataaaaaatactattaggctgggtgccgtggctcatgcctgtaaccctagcactttggaaggctgaggcgggtggatcacctgaggttgggagttcaagaccagcctgactaacatggtgaaaccccatctctactaaaaatacaaaattagctgggtgtggtggcgcatgcctgtaatcccaactactcgggaggctgaggcaggagaatcgcttgaacctgagaggcagaggttgctgtgagccaagattgcgccattgcactccagcttggcgacagagtgagactccatctcaaaaaaaaaaaaaaacaaaaacaaaaaacaaaaacaaactattaatccatttttactaaaaaaaagaaactttaaaaaattgggctagataataaagtgtcttatcttaaatttccagaaaatatatacacgtattttttatttcagatagcttgcacatttagtgatgtaggtaagtaaacttttaatatcatgaatagtctgaaccccacactcaggataaaatattttgattatttttttctttttttgagatggagttttgctcttgttgcccaggctgaagtgcaatggcacgatcttggctcactgcaacctctgcctcccaggttcaaacgattgtcctgcctcagcctcccaagtagctgggattacaggaatgtgccaccatgcccggctaattttgtatttttagtagagatgggttttctccatgttggtcaggctggtcttgaactcccgacctcaggtgatctgcccccctcggcctcccaaagtgctaggattacaggcgtgagccactgtgcccagctggtttttcatgttcaaaataatatagtactttaaaagacagactctaaagcaactgtttggagtctctaaattgtctctaaatatttaatgatttctttcacttgttaaaggaaaacattatttaaattttttttttttttttttttgagatggagtcttgctctgtcacccaggctggagtgcagtggcgcaatctcggctcactgcaagctctgcctcccgggttcacgccattctcctgcctcagcctccctagtagctgggactacaggtgcccgccaccacacccggctaattttttgtatttttagtagaggcggggtttcaccatgttagctaggatggtctcgatctcccgaccttgtgatccacccgcttcggcctcccaaaatgctgggattacaggcgtgagccaccgcatccggccattaaatatgtacttttaaactacatttaaatttatcaaatgaacataaataattacttggtaataagaaatttattaaacaagtagatgaggaaataatttgcctccttttctaattttataactgacaaactctccgtatttaagtgcttacttatctagagttactggagtgctaaagagaagtactcaatgagaaatctttccataatattcatatccatgctgtatgtgaatatatgggaatttgccaaggataatattaaaaacattcaagcctcagactgatgaggatgaacatgggttacaaaccactgatatggccagtttgttttcaggcttaacattgatcatgatctaacagaataaaaaaataagagttaataaatttcctgtatacttactatgtgctgggcattgtttggccacctttatttgtatcaattgctttaattttaccaaaaccctaggagttatgcagtattatcctcactccacagctgaagagtcaagcacagagaagtcaaaacagtccataagtggcagaactggaatgcaattaggaaccacctgataccgagtttcaactttaaccattatactcaacactcttttacccaatgcttgtttccattcctgacataacattttggctttgaaatttctaatttagtaaaaacaaagaagaatttaaaaatcactcttttttaccgttagatagtatgtagaacttgatgttttgtttaaaccacctattactaagcctaaaccaaatactttggtaaatgggttctaacagtgatatacttctcacgacttaaaattgccactaattttacttttgaaatatattagattttatattagaagctaggatgagcctattatgatacagaaaatttgtggtctgcaggaacatcatcattcattgcatggtctacagtttccgaaaatttcagaaacactaacataagaatacttttctgattgaataatttaaggatattaagtcttctcagtgactaaaatgaaatagagttactaatcagacacaatgtggttttaagtgttatttaatgaacacatgtaaagtttcttttaaacacatgttaacaacttatttctattgatttttcacttctattataaaaaatattaaaatgtctgtgactacaaacgtataaaattcattcaaatctaaacagtgctaatcttaaaagttctgtatacttagaattatagaaagcctattctctatttatacttagaagataaaaaaattgcttttcagcaaacccagtggagcaatcataagctcactatcataaggtattataatattaatacaatcatctagagaaaacttttaggtatctggatgttcaagttgtttaacttatatgattcagaaactatgatttatttatttatttaggagatggagtctcactgtgtcgcccaggcaggagtgcaatggcacaatctcggcttactacaaactctgcctcctgggttcaagtggttctcctgcctcagcctcccatggtctcaaactcttgacctcaggtgattcaaccaccttggcctcccaaattgctgggagtacaaaagtaagccaccatgcccagcccagaaagtatacatttttattaagtataaaaaattaaaatatgtcaatttctttttctcagtctctaaatactgtcattatttctagttgacataacaagagaatttaaatgctgtggctgtagaaactagaaatgtgggctgggcgtggtggctcatacctgtaatcccagcactttgggaggctgaggtgggtggatcacctgaggtcaggagttcgagaccagcctggccaatgtggtgaaaccccgtctctactaaagatacaaaaattagccgggtgtggtggcaggcacctgtaatcccagctactcggaaggctgaggcagaacacatgtgtttaaaagctactcggaagcttccctgaggcttgaacccgggaagcagaggttgcagtgagtcgagaatgcgccattgcactccaacctgtgggacaagagtgagacttcgtctcaaaaaaaaaaagaaactagaaatgtgatggttgactctggtttactttctgcctttttattttatagaaacaaagcagcataaggaagggcagaaataatacatcttgattgcaaacacaccagtgcccgtctagagagaatatatttctgagcatattaatttgaaattcacggcatcttttgtagaagtacagactagtatatgacaaacaataaacacaaataaaaatttaagactgcaatagaattagaaaagtattctaaaaataaattctgatcaattattttttttccaccagaatagttgtgatgaaatggttgtggcagtgtgatcttaagtaaccaacactctcatcattcttgggctatggacattagactttgatgccttttttctttataaaaatattttcttttcataagtcaggaatttaacctgatctgcacacccactcattttcaaaaatagtttattctaaaaaagaaatgcggtttcttttttttcttttttttttgagacagagtcttactctgtcacccaggctggagtgcagtggcacgatcttggttcactgcaacctccacctcccaggttcaagcaattcttctgcctcagcctcctgagaagtgtgcaccaccacacctggctaattttgtatttttagtagagctggggtttcaccatgttggccaggctgctcttgaactcctgaccacaagtgatccacccacctcggcctcccaaagtgctgggattataggcatgagccaccacacccagcctcagaaatgcggttttaaaaccacatttttttctaaaaacagtacagtaacaaattaactcgatagtctagtgtacagttaattaattaaaaataaagatgtggagtcatttattttaaccacacagttaagaataaaacatttttcgggctaaaagctttcagagatgttagcttataggatgtggggagacctggcatagaaacattcactcttatgcccaaagggaaaataattctgtgtctttcaacccaatgctaactatgaaccaagaattggaaaaatgtaacatgtcattataccacaaggcattttattatttttattatagattcaggtgtacatgtacagatttgtagcataggtatactgcatgttgttgaggtttggacacttaataatcccattgtccaagtagtttacagtattacctaatgagtaatgagtaatttttctgttggttttttttttttttttctttcctgagatggagtcttgctctgttgcccaggctggagtgaagtggcatgatcttggcttactgcaacctctgcctcccgggtacaagtgattctcctgccgcagcctcccaagtagctgggattacaggcacctgccatcatgcctgtctaatttttgtatttttagtagagacagggttttgccatgttggccaagctggtctcaaactcctgatctcaagtgatccgcctgccttggactcccaaagtgctgggattacaggtgcgagccactgcacatggcccactttttgactttttttttttttctttttgagacagagtattgctctgttgcccaggctggagggcaatggcctgatctcggctcactgcaacctccacctcccgggttcaagcgattctcctgcctcagcctcccgagtagctgggactacaggcatgtgccaccacgcccggctaattttctgtacttttagcagagacagggtttcactgtgttagccagactggtctcggtcttttgacctcgtgatctgcccacctcagccttccaaagtgctgggattacaggtgtgagccaccatgcccagccactttttactttttaataagagccattctaactggcgtgagatggtatcacattgccattttgatttgtatctctattgatttgggatgttgaacaattttttgcatgtttattggctgcttttatgtcttcctttgagaagtgtctattcatatcatttgcgtttttcttattaaattcctgatagattctatatattaacgctttgttgcatgcagtttgcaaacattttatactgtaggttgttttttttactttgtcaatagtttcttttacagtgcagctctgcagttgaattaggtgctaatttttatttttgttgtattcacttctaaggtgttagttataaatgctttctggaggccagtgtctagaagagtactttctaagtgctctaggatttttatagcttgaagtttcactgttaagtctttaatctatcttgagctatttggttttttatatatagtgagaggtaggggtctagttttcttcttctgcgtaagactaaccaattttcccagtgccatttattgcactgggagttattttctctttgttaatttctgttgactttgtcaaaaataagttgcttgtagaagtgtagctttgtttcagggctctctcttctgttcaattggtcattatgtatacttttgtaccagaaccatgttatattggctactgtagcttatagtatagtttaaagtcaggtaatatgaggcatccaagttgattcactttcacattgccttgggtttttggctttttaatttcttatatgaattttagaagattttatctgaattctatgaaaaatggcattgatagtttgatagaaacagcacttaatctgtaggttgcttcaaacagcatggacatttaattatattgattcttccaatccattagcataaaatgcttttttatttatttgtgtttaattttcttcagcactgttttgtaattttctttgtagagatattttatctacttgatttaatgtattcttaggtatattatttgtttgtggctattgtaaacagaactgtgttcttgattttgtcctcagcttgaatgttattggtgtacagaaatgctactcatatgtgtatgttggttttgtatggtcagactttgctgaagtcattttttagtcttaggggtgttttagtgaaatctataaagttttccaggtagagaattatttcacctgtgaagataatttgacttccttttttttcctatttggatgacttttatttcttgatcttgttgaattgctctggctaggacttttagaactatgttgaataggagtatttagggtgcatatttttttcttatttttattcttatggagaatgcatccagattttgcccattcagtatgattttggctgaagatttgtcatagatgactcttattatttggaggtatgtttcttctatgcctagtttattgatttttttttttttttgagatggagtcttactctgtcgcccaggctggagtgcagtggcgtgatctcggctcactgcaacctccgcctcccaggttcaagtgattctcctgcctcagcctccctagtagctgggactacaggtgcccaccaccatgcctggctaatttttgtatttttagtagagacagggtttcaccttattggccaggctggtctcgaactcctgaccttgtgatcagcccacctcggcctcccaaagtgctgggattacaggcgtgtgagccaccatgcccggtctttttttttttttttttgagacggggtctcgcagtcaccaggctggagtgcagtggctcactgcaacttcaacctcccaggttcaagcgagtctcctgcctcagcctcccaagtagctgagactgcaggcatccaccaccacgcccagctaattttggtattttttgtagagaaggcgtttcaccatgttggccaggatggtctcgatctcttgacctcatgatccacccgcctcggcctcccaaagcgttgggattacaggcgtgagccactgcactcagccttgttgataatatttttatgaatactggattttcttgaatgctttttctgcacttgtgataattatgattttttgcttatatatttttacaaggtgaatcacacttattgacttgtatatgaacatttttgcattcataaaataaagctcacatgatagtggcaaaataactttttgatttgcttatgaactcagcttgctagtttttttttttttttttttttgagatggagtctccctctgtcgcccaggctggagtgcagtggtgtgatctcggctcactgcaagctccgcctcctgggttcacgccattctcctgcctcagcctcctgagtagctgggactaacagtgccccccaccacgcccaactaatttttttgtatttttttagtagagacggggtttcactgtgttagccatgatggtctggatctcccggcctcgtgatccgcccgcctcggcctcccaaagtgctggaattataggggtgagccaccgtgccctgcccctcagtttgctagtattttgtggaggatttttgttttaatgttcatcaggaatattgacctatagtttttttgttgttgttctgtcttcactaaatcgtggtaacaagatgacaatggtgtttttttttttgtttttgtttgtttgtttttgagacagagtttcactcttgttgcccaggctggagtgcaatggtgcgaattcagctcactgcaacctctgcctcccaggttcaagcgattctcctgcctcagcctcccgagtagctgggattacaagcatgtgcccccacgcccggctaattttgtattttcagtagagatggggtttcttcatgttggtcaggctggtctcaaactcccgacctcaggtgatctgcccgcctcagcctcccaaagtgctggaattacaagcgggccaccaggcctggctgacaatggttttatataagttagggaggaatcacaccttgatttttttgaatacattcagtaggattagtaccagctcatctttttgcaatatatgttgtaaaactcagctgagaattcatctgatttagggctatttcggttgataagttttttattactaattcaattttattatacattttagacatttctgttttgttcaagatttttgtttctttctggttaaatcttgggtcatgtgaatccagtagtttatttattttctctgaagtttctagtttgcaagcgtagaggtgttcatagacgtatctgaggatgtttgtatttctgtggtattaattgtggttttacaactgtaacgtttaaattgatgctggataaaagttctagaaaagtcacagtccctcacaataaatctctgaaaagcataagtataaaaaaatgcactgcaagccaataaatgccacatataacttaaaaaaattcacagctaataacatactatatgaggtaatgttgtaagcttttactctaagagctagaataatacaaaaatgcccactttctccagtcttactaaacatagtactaaatgtccaagacaaacaaattagagaataaatcaaagtgtattattctgttctcttgcagctaataaaaacatacgccaaactggaaaatttataaaggaaagaggtttaaagaactcacaattcaacatggctggggatggcctcacaatcattatggaaggtgaaggaggagaaaagtcatgtcttacatggtgataatggagagcatgtgcaagtaaattgccctttataagaccatcagatctcatgaggcttattcactatcatgagaatagcatgggaaaacccactgccatgattcaattaccttccactgggtcttttctatgacctgtggggagtatgggagctacaattcaagatgagatttgggtggagacacagccaaataccataaaggcatccagatggaaaagaaaaagtgaaattattcctgtttgcagatgacataattttaggtatagaaaagcctaagaatttactaagaactactagaactaataaatttgttaaacttgcagaataaaaaaatcaatgtacaaaagtcaatagcagttttatacactaacaattatctcaaattgaaatgaaaaaagaaattccatctacaatagctgtagttaactatactttgaaataaatttagccaaaaagtttcaacaccttacaatctaaaaaacatttaagtaaaaaactaagtaatacacaaataaaaatacattactcattcatgaattggcatatatatatacatgtatatatatgtgtgtgtatatacgtgtgtgtatgtgtgtgtgtatctatatatagatgtatttgagacggtgtagcgctctgtcacccaggctggagtgcaatggcatgatctcggctcactgcaacctctgcctcctgggttcaagagattctcctgcatcagcctcctgaatagctgggattacaagtgtgcaccaccacgcctggctaacttttgtatttttagtagcgatggggtttcaccatattggccaggctggtctcaaacacctgacctcgtgatctgcccccctcagcctcccaaagtgctcagatgacaggcgtgagccaccgtgcccggccagcattaatatttttaaacagctgtattacacaaaatgatctacagatataatgcaacctctatcaaaatgccagttgttgggagcaagccccccaaagtctagccataaactggccccaaaactggccataaataaaatctctgcagcaatgtaacgtgtccataatggctgtaacgcccaagctggaaggttgtgggtttatgggaatgagggcaaggaacacctggcctgcccagggtagaaaaccgcttaaaggcattcttaagacacaaacagaagcctgagccatctgtcttaagggagtgttcctgctgcagttaactagcccaacctattcaattaattcgtcctatcccttcgtttcccataagagatacttttggttaatttaatatctatagaaacaatgctaatgactggtttgctgttaataaatatgtgggtaaatctctgttcagggctctcagctctgaaggctgggagacccgattcctcacttcacacctctgtatttgtgtgtgtgtgtctttaattcctctagcgccgctgggttagggtctccccaaccgagctggtctcagtagccagtgaaatacttaatataaattttgtaaaatatatgtaaaattcatatggtaccacaaaagacccagaatagccaaaggaataaaaaagtaaaaaaggctgaaagtatcaccctacctgactttgcaacatactgaaaaactatagtaaccaaaacagtgtggtacttcaataaaactggatacatagggcaatgtagctgaggagtgtggaaatatatccatgtatttacagctaattgatattagatataggtgacattttcttagagaaaggacagtatcttcaataaatggtattgagaaaactttcttttttcctttccttttttttttttttcttgagagggagttttgctcttgttgcccaggctggagtccatggcacgctctcagttcactgcaacctctgcctccacattgttcaagcttgcctcagcctcccgagtagctgggattacaggcatgcaccaccatgcccgactaatttttgtattattagtagagatgggatttctccatgttgatcaggctggtctcaaacttccaacctcaggtgatttgcctgcctcagcctcccagtgttgggattacagatgtgagccaacgcgtccactgagaaaactttctagccacatgcagagcaataaaatgagaccctcatctgataccatatataaaaattaactcaaaataaattagatattacaatgtaaggtctgacactctgaaaccactacaaaaaaaaacagagtgaaagacccataacattagtttgggcagtgacttttttgatataacttcaaaatcccagggaaccaaaagaaaaatagattaatcagattacttcaaataaaaaaattgctgcaaagaatctgagacaatcaacaggatcagacaactaaaaaatggaaaaaatgtgcaaatcatacatgtgacaacgtgttaatatcaaaaatatataagaatctcaaattacaatacaaaaagtactattaaaaatgagcaaaaggcttattttcaagaatagacatacatagtcaaaagatatatttaaaaatgctcaatatcaattattatcagggaaaggaaagcaaaaaaataaaaaaagatgagatatcaactcactcctgttagaatgactctgattaaaaagaaaaagaaaatgagtattagtaaaggtgtgaagaaaatagaatgcttgcacactgttggtttgaatgtaaatgagggcagccattatgaaaaacaaaataaagatttctttaaaaatttaaaatcaggccaggtgcggtggctcacgcctgtaatcccaggactttgggaggccgaggctggtggatcacgaggtcaggagttcgagaccatcctggctaacacagtgaaaccttgtctctactaaaaatacaaaaaattagttgagtgtggtggtgggttcctgtagtcccagctgctcaggaggctgaggcaggagaatggcatgaacccgggaggcggaggttgcagtgagccgagatcgtgccactgcactccagcctgggcaacagagcaagactctgtttcaaaaaaataaaaataaaaaaaaaattaaaaaaataaaaatttaaaatcaaactatcatataatatagcaatttcaataatggatacatatctcaaaataattaaatcagaatgaagaaatatttgcagaaataatctgcaagaaatatttgcagaatgaagaaatatttgtaacattcttcacaattgccaaaatacagaattaacacttcaacatctaatgagtacataaagacaacgtggtatatatacacaatggaatactattcatctttaaaataaaaaaatttattattttcaattacatagattaaccaaattatttcacttacatgattctagaaaaattaatctaactgaagtggagaataaaatggtgaccaccagatgccaacatatttggaaaaaagaggggtttagaaagatgtcagtcaaatacataattacagttgaataggagaaataagttcaaaaaagcttttgtactgcatggtgcctatagttcataacaatgtatttgtatttctgaaaaatgctaaaacattgtcatgtgctcttaccacaaaaatgttaactatgttaggtaaagcattaattacctagaatgaagcatttgacaatgtgtatatacttcaaaatgtcatgcttcacagaataaatgcacaatttatatattacagacggtatgaaagacactaaaagggcagctgtttcttatggtctcatgactggccactctgtgaacacagtaaacaagtttgcacgcaaaataatagaaaatgtttttatctaaaagctgccatgatcttcgaatgttttccagagaatatgaccaagaagttggctagagttaggtgactaaatgtaaaaactgtagactgaacttcacccactaaaaaaacatataaaactgagaaaatttcttcaaattgtaatatgaatatggaaaagaaatattactccaggtttcaaaatcacagaggtcattttactattttgcaatgtttaatgttcacacttacaaatagaagattttgcatggaaacgtacattgtggcataagtatactgtagaaaattaaattaaaagtttaatttctaagatatattttcaagcaaattttatatttgccacactttgtgtaagaatttaataagattattctttaacaaacagagaaaaacaacgctaaatgatttaatcctttcatctgtggacactgtatgctttttgttttaatttaactgatcagaaaattatattgatatgcaaaatctccagttaaaaccaatcttgcagtgcattaaaaataccgatttctcatcaaaacctacaatataccatgtgaaatgacatggtgtgaagagaacagtgagaaaactgtagccacagcacagcaaaaaggagggctgtgatgcatacacagctgaaatacacataataagacaaacaaaactaagacaattaggaaataaaagaagcacaattttttaattcagcaaaactgagctttgcagcctgaaaataaatgtcctctccacataaaaaatcaatgttatttctcacaattgatatgttccatctctgtcttgaagttacaaactaactccaacaggaatatttatggcttattataaagcatctgtgacacagaaagcactgtcatgtttgtttgctatatttatatataaaaacatcctcatgatttaggaagcccccctagtactcacctaaataaatgggctcaatcaatatttacttattttcattataaaaactgaaaggaacaaaaactaaaaaaagtaggcttatacagcgttctccaattaaaagaacaaaataaaatattctaacaacataaaatataacaatacactaattttgaaattaaatctaaattttttgcactaattttataaaaattatttttataatctctgaccagctcacatagcatcttatataaaataagagaaaaaaatgtaagacacaagaaaattatgggtctagcctaagaatcaggcaagtaaaaacaaaaatttgcatagggagattctgaattataagccatacaattttacagtaatcaattcaatacaaagcagagagtatggatttgttttcagcatttttaagtttttttagttttgcagtcatcatctaattaaaataatttgatttgtttcaatattgctcttctgaaactaggtagaaactcatactcgcaaagaaggcatttatttactccataatttttttaaacccaagctttatctttaaagtaatatatgtatatatttaactctgtgtaaatcaaaactaatagtctgtatgtgcttgcaggcagagaggcaacatgtttgaagaaaaatatataacaattttttaatgttaattcaggtctcagaaatgtatgcattttgtttatattgttttcttatgaccataaaagagaccctgtagccaacaacaatttaatgtacatttgaaaacaactaaaagtggctgggtgtggtggctcccacctgtaatcccagcactttgggaggccgagggggctaatcatggggtcaggagttcaagacaaacctggccaacgtagtgaaactgtttctactaaaaatacaaaaattagctgagtgtggtggcatgcgcctgtagtcccaactactcaggaggctgaggcggaagaatcacttgaacccagtaggcggaggttgcagtgagctgagaccacgccaatgcacccaggcgtgcacagcctgggtgacatagtgagactcgtctcaaaaaaaaaccgaaaagtgcagaattagtttataatacaaacaaatacaaacaataaatgctgcaggtaatgaatatttcatttacccatatgtaattattacatattatatacctgtatcaaaatatgccatatatgccatatttacacatactatgtacccacaaaaattaagaaaaataagtttaaataagaaaaaatgagtaataattcaacctacaggaataatattctctgacttatttgcaatttaaagccactggcaaaacagattactagaaatgttagtccattatcttattaaatagtgtatagttaccatcatttacctatacccttgagtaagatgggataagttaaatttaatggcataataatgcttcattgaatgcacgatggtcttaacatgttttttaaaaagcctgattaataagttcacacattatctaaaaattttaaaatgtactacattttattacataaaagtacaattggccaggcatggtgactcgcgcctgtaatcccagcactttgggaggccgaggtgggtggatcacccgaggtcgggagtttgagaccagcctgaccaacatagagaaaccccatctctattaaaaatacaaaattagccgggcatggtggcacatgcctgtaatcccagctactcgggaggctgaggcaggagaatcccttgaacctgggaggtggaggttttggtgagccaagatcacaccattgcactccagcctgggcaacaagagcaaaactctgtctcaaaaaaaaaaaaagtacaattagtaaaatgatataccagaaaattttttttctcaatataacacaggatatttatctgaactcctacctcatgcatcagtcaatattataaattaaccagaaagagcctctccacttacattttcatcttgcatcttacattttaatgtccttaactctttcactaaaaaaggtcgtaaataatgcacacctaataacaaagaatctctcatctttgatgcagcaacaattaagtcacatgctttcacatgtgaatacaataggaatgaagagcataacttgagttaaatgacattattcacttttcataaaacctaatttttttcaaaggatagtttgaatgtagttacaactctgcaaaaattttctacttcttataatgttatatacaaataattcatttaccaactttagttttagattcttttctatactcagcaatctgatttagtgtaatgcctgaagtgtcagtgccttaactatttctactgtgaattatctgatatttacatagaattttggattaaatattttttcatatttactgcatctgcaaaaatagattttagtatgaaccctctagtgttttctaagctgtcgtttttgaaaaaatgttttcccaaatttattacatttgcagggtttttctccaatataaatttccttatgttgcacaaagtttaagcaactgctccatggttttcctctagcacaaaatgtgtacaatgagatctgtgatacaagtaaaggtaccacaaccctccttatgttcataatgtgtgtcttcaaaatgaatactcttcactttagaggcttatattttctgaaagatttttgacagtaattgcatgtataatgcttttattaagtatgaaatctctgatgttgagtaagatgtgaacagatattaatggctttttcacattctgtatatttgaaatttttttctagtacaaatgctttcctgtgcaataaggtgtgagcattggttaaaagttttgccacattcttcacacttgtaggtttttttttagtatgaattatcttatgcacaatcaagtgtgacaacttttaaaggttttgttacattcttcacatttctaagatttctcaccagcataatttcttttatgtttagaaaactttgaagtgttttcaaaatcactgttacatcttttaggtttgtagagtttctcaccagtatgaattttcttatgtccagtaaggtttgaggactggttaaaagctttgccacatttttcacattggtagggtttctctccagtatgaattctcttatgtctagtaaggtgtgaggactggttaaaggctttaccacattcttcacattggtagggtttctctccagtatgaattaccttatgtgtagcaagatgtgaggaatggttaaaggctttgccacattcttcacatgtgtagggtttctctccagtatgaattttcttatgttcagtaagttttgaggatcgatagaaagctttgccacattcttcacatttgtaggatttctctccagtatgaattctcttatgtgtagtaaggattgaggactggttaaaagctttgccacattcttcacatttgtagggtttctctccagtatgaattcttttatgtgtagtaaggtttgagaactggttaaaggctttcccacattcttcacatttgtatggtttctcttcagtatgaatattcttatgttcagtaaggtttgaggattggttagaagctttgccacatttttcacactggtagggtttttctccagtatgaatgctcttatgtctagtaaggtgtgaggacttgttaaaagctttgccacattcttcacatttgtagggtttctctccagtatgaattatcttatgtgtagtaaggtgtgaggactgcctaaaggctttgccacattcttcacatctgtagggcttctctccagtatgaattatcttatgtctggtaaggtgtgaggactggttaaaggctttgccacattcttcacatttgtagggtttctctccagtatgaattatcttatgtctggtaaggtgtgaggactggttgaaagctttgccacattccttatattcattgagtttctctctggtatgaattatcttatgtgtagtaagggttaaggactgattaaaggctttgtcacattcttcacgtttgtagggattctctccagtatgaattattgtatgtgttgtaatgtgtgacgacaggttaaaggctttgctacattcttcacgtttgtagagtttgtctctagtataaattatcttatgtgtagtaaggtttgtgaactggttacaggctttgccacattcttcacatatgtacgatttctctccaatatgaattcttttatgtttagtaaagattgaggatccattaaaggcttttccacagtcttcacatttgtagaaatttactctagtacaaattattttatgttgagttaggtttgaaaatatgcaaaatgatttgccaaattctttatatttaaaaggtttttttctggtgtgtcttaccttatgtccatttaaatttgaaaatttatgaaagattttcatatatttatcacattgaaatattttgctctgggtagttggcaaacattggttaagtccattataacctcctttttgcactttgcactcatccacacttttacttaactgtaaattctcatgttcacattttccatatcttcttggtgtcactttttggaaagaatcttttatgttctgctctggtgaaaagtcttgggcaaaatgagaacaaataactgaaagaaataaaaataacaaatgactccacttgataagactctaaatatactttacaaatccaacctatacaattatacaaattacataagcaagatggtatagcaaaataccaaaggccctaattttttttttttttttttcctgagacggagtttcaatctgtcacttgggctggactgcggtagtgtgatctcagctcactgcaactgctacctcccaggttcaagcaactctcctgcctcaggctcctgagtagctaggattacaggcatgtgccaccatgcccagctaatatttgtatttttagtagaaacggggtttcaccatattggccaggctggtctcaaattcctgacctcgtgatctgcccacctcagcctcccaaaatgctgggattacaggcatgagccaccgtgctcggcccaaaggccctaatttcttaatagaaatataaatgtaacaaaaacatattgaccaaaatacatttgtggaaaatttataaattagttaagtgtgtgcaatgacccaggtgagcagaatgcaaagagccacatagaaagaaaataaaagcctgttacatttacccaacatagatctttctgctccccaatataacataatgcctttaaaagtaaattgccaacttcaattgttttgcatacagcagcacacctgagagtggataatttataaagaaaaaaggttggcagggtgcggtggctcatgcctgtaatcacagcactttgggaggccaaggcaggcaaatcaactgaggtcaggagtttgagaccagcctggccaacatggtgaaaccctgtctctacttaaaatacaaaattagccaggcatggtggtgcatgcctgtaatcccagctactcgggaggctgaggcaggagaatcacttgaatctgggagacggaggttgcagtgagccaagattgtgccactgcagtccagcctaggtgacagagtgagactatgtctcaaaaacaaaaaaaaaaaaagaaaaaggagaaagtttatttggtacacagtttggcagactgtacaagaagtgcatgccagcatcgacttctggtgagggtctcacaaagcttacaatcatggtgaaacacaaagagtaattatgtgagtactatgtgaacatatcacatggtaagggacagagcaagtgtgaaataaagaagccaggtaattttaatgagccagctctcatttaaattaacagagggtaaagtttttgattaccaagagggtgatgccaagctattcatgagaaatttgcccccatgactagaacacctcccaccaggttctgcatccaacattgaggactgcgttgcagcatgatgtttggggaacgtgaacattcaggttgtaccatagataaactaggcttaacagacatgtaaactactttccagttaaaagcaagaaaacacacaatattcttatttgcacctggtgtattctgttaggatacacaacaagtcttattaaatttaggaataccaggtgggtgctgtggctcatgcctataatttcaacactttgggagaccaagatgggaggatctcttggggccagaagtttgagaccagcctaggcaacacagtaagactccatccctacaaataatcaaaaaattagccaggcatggtagtgcatctctgtagttccagctagtcaggaggctgaggtgaaaggagcacttgagccctgaaggttgaagctgcagtcactgcactccagcctgggtaacagaaagagatcctgtctcaaaacaacaacaacaacaaataaatgtaagaaaataaaaattgtacactaaatgttttctgactaagactgaatgaaactggaaattgagaacacaagtaaaactggcacatccaaatatacatgaaaataacacatactcttcaacatagttttactcaagggtcaaaaaatttaatttttcaaagatgtctgtataacttacagtgatgaatatattcaatataatttctataaaaatccccaaagtggccgggcgcggtggctcaagcctgtaatcccagcactttgggaggccgaggcgggcgtatcacgaggtcaggagatcaagaccatcctggctaacacagggaaaccccgtctctactaaaaatacaaaaaaattagccgggcgtggtggcgggcacctgtagtcccagctactcgggaggctgaggcaggagaatggcatgaacctgggaggcggagcttgcactgagccgagatcgtgccactgcagtccagcctgggcgagagagcaagactccgtctcaaaaaaaaaaaaaaaaaaaaaatccccaaagcacaagttttacaagaatattgtttaaaattttaaaatttgattataaactatagccaaacattcatgaaaaagaacaaagaggtgttatacttctggattttaaaaaatattaatagctacaaaaacaaggtggtactgacacaaagacagataaacagattaaaaaacagaatagagagcccagaaataaactcctcagtatatgattaaataatcttttacaactttgccatgagcacacaatagagaaaagacaatctcttcaaaaaatcatgttgaaaactggacaccaacactgataaagctggattctttgaatcatatacaaaaaatattttaaataaaatacttaaacatataaaaataactaataaatctcttagaaaaaaagagaaatgacatgacgttgttcttggcaccattttttttgatatgatattaaatgcatgagcatcaaagaaaaaagtaactacactacaaaatttccacacatcaaaaaaacattagagtgacaatgccttgtagaaaataagtaaaaatatttgcaaattatatgtgataagagttaattgcagggagctaaaggcccgagggtcatgaccaactcagcattccactgaaggctatatgatcaaacagcaaactgtttatcatgaatgcaggatgtgggcaaactcacatctgtgcctgccaccagaaggtttgctgagggcagtcactccctggtgccatgctccttgaggttatctactggaacatctggagactactgttcaaagaatgcagttgtgcaagcctgcactaagtaaagcagctgacagacaaccacccccttctccctatctcctttactcaataaatacaaaggggtatagaagttcacggcccttattcactagaagcaaggagccccctgaccccttcttccaaatacactcttttgtctttgtctttattcccacgttcatcctcctttgttcagtccagcaaggtccatggcagttaatattgagaatacataaacaagtcttaaatggactaataattgaaataaattttaatcaaaaaaatacaaaaattggaaaaagcatttgaaaagacacaggaaattacatttgtagagaaatgcataaaaatcacgtgaaaaaaactcaaaccaattagaatggccactatcaatttttttaaaacattaaatctgttgatgatgaactgaaaatccgttatttgttggtgtaaaacaaggatgcagccactgttttaaaatgttatgttacccaaataattaaaaatggaatcattaaatacaataattcaatttgtaaatctatatgcaaactctgcaatgcaggagctagaaggcatatttgaatattgatgtttactgtaccagtattcacaaaagccaaaagactgaagcaaccctttcttgacttacaaatacatcaaaaaatgtaacatataaatacaatggaatattattcagccttaaaaaaaatcttgtcacactttaagacaaacttcgagaattattatgtcacctgaaataagccattaacaaaatgatggctactatatgatcccatttataggagatatcttaagtagtcacgctcataaaaacagaaagtagaaggatatttgtcaagggctggagagagggtaaaatgttcagctgttacttaatggatattgagttttagttttattagatgtaaaatttttaaaagtcttttgtataacaatgtgaatacacttaacatgtctgaaaagtacagcttttttctgagacagggtctcattctatcacgtaaggtggagtgcagtggcacaattatggctaagtgtagcctcaaattcccagactcaagtaatcctcctccctcaatctttcaaagagctgggaccacaggtgcacacaaccatgcctgggttaaaaaaaaaaaaaaaaaatttgtagagtgggaatctccatatgttgcccaggctggtctcaaacttttgggatcaagcaatcctcctgccttaagatcctcaaattctgggattacacatgtaagccacaacctggaatgtacacttcaatagatttaagacaatacattttatgttatgtgtttttacaattaatttttctcaaaaaaaatctgaaaaaattcagaatcataaatcttttcataaattaccttcaaatcacaaaagtgtttgtctcacacagagcaaatacatattcatcattaaacacatggtgaaaataaaactatttccatgactactcaattagacaagataaaacaatcactgaaaatcaactaagaaaaaaaaaaaagggccgggcaccgtggctcacgcctgtaatctcagcactttgggaggccgaggtgagcggatcacctgaggtcggaagttctagaccagcctggtcaacattgtgaaaccccatctctactaaaaatacaaaaaatatctgggtgtggtgacatgagcctgtaatcccagctactcggtggctgaggctggagaactgcttgaacccgggaggcagaggttgcagttagccaagattgcgccattgcactccagcctgggcgacagagtgagactccaactcaaaaaaaaaaaaaaaaaaaaccaaaaaacaactaagaaagaatatatacaagataagtcataaccaaagctgtggttatatttacagataaacacacaaacatatatactctcattgtgatagacatatggctgatgtacctcttaagtaaaccccacattgacttaaagtgtacaaacagaattgcaaattgtctaaaattataatacatatgtaaaactaaaaagcacaagaaactaatattaagaaacctacactaaaaaaaacacactagtaggccaggcacggtggctcacacctgtaatcccagcacttagggagactgaggtggacaaatcacctgaggtcagaagtacgagaccagcctggccaacatggggaaaccccatctctactaaaagtactaaaattagccaggcctggtggcatgtgcctgtagtcccagctactcgggaggctgaagtggtaggttcccttgaacatgggagctgaaatcactccactgcacttcagcctgggcagcaaagtgagaccgcatctctaaaaaaaaaaaaaaacacccaggcgcagtggctcacacctgtaatcccagcactttgggaggctgaggtaggtggatcatctgaggttgaaggttcgagaccagcctgaccaaaatggagaaaccctatctctactaataaaagaagtacaaaattaaccaggcatggtggcacatgcctgtaatctctgctactcgggaggctgaggcaggagaattgcttgaacctgggaggtggaggttgcagtgagccaagactgcgccattgcactccagcctgtgcaataagagcaaaactccatctcaaaaaaaaaaaaaaaaaaaagatctggtttgcaaaacgatgtaccattaagaatttatctaaataggctgggtgcggtagctcacacatgtaatcccagcactttgggtggctgaggcaggcggatcacctgaagttgggagttcaaggccagcctgaccaacatggtgaaaccccgtctctactaaaaatacaaaattagctgggcgttttggcacatggctgtaatcccagctactcgggaggctgaggcagcagaattgcttgaactctggaggcggaggttgcagtgagccgagattgcgccattgtactttagtctggcgacagagtgagactccgtctcaaaaaaaaaaaaaaaagaaaacaaaaaaaattctattctctagataaccgtaatatgtgactgtgttcacagaaggcaagtattttgaataactggcatgtgctccatggcagtaaaatttcaaaggaaatggagtgtaatcataaacagaagattctaatgagaaacttttaatcaataagcatttaaaagaaactagagacaattttatttatttatttatttttttgagatggagtcttgctctgtcacccaggctggagtgcagtggcacaatctcggctcactgcaacctctgcctcccgggtttataccattctcttgcctcagtctcctgaatagctgggactacaggcgcctgccaccatgcctggctaattttttttgtatttttagtagagacggggttccaccatattagccaggatggtctcgatctcctgacctcgtgatccgcccaccttggcctcccagagtgctgggattacaggcgtgagccactgcgcccggcctgaggttggaaaattgcttcaggccaggatttcaaaaccagcctgggttatgtagcaagacccaatctccaaattaagtgcctttaggagagctttgagatccagggagggagttgtgaaactgctaatgcccaattctgaggagtgctatttttcagaaggcaggtggcaaactacagaactcctatttttcagtatagaccaggaaatggactacccaacttggtcttactgatcattctgaagttactctgtaatcatctcagacttttcccagccacagtctgtaagaggtcacataccctttcagaggccttgagaaagacacccacttatagccatgcagcaggcctgcagaccttggcctttactgtggtccttaaagcagttcaatgactcagtttcacatccaagccacagttcacagccagttctgcctatgttaaagcccactgagtgacctggaaaaatcctctctgatacacagtgaatgccatactcatccacattcttaaataagactcaaccatatacacagacctgactgcagaaacctgccctagtgactgccctacaggtcaaagtcttgagagaaattcagtctgtctaaaaaataaagtgttaattacaactacccaagccccttgtaacaagccaactaaaggtggaccctagtgcagacccagcagccttatgaccaagctacatgccctctccactacaaacccagagggcatctcattaccctgggggcccaacaaaagacctttaccttctgaaaacaggttataaaaacttgaagaggcttttgctttttcaagtttaaagacactaatacaaaactatattttgcctatcgtcaatgcttctcttttaacaaagaactgttagtacgtggcaaaagaattagtcaaaaaaatgaaaaagagccattgaaattgaagacaagtaagtaaaaagttgctggttgcagatcatatgatagtatatgtgtatatatatagagtacattaaatcctgtctaaactaataaatacactcagtaaattagcaaaatattaaattaacgtacaagttatggttccatacacttaagctatcggataaaatatttaaaaaatcttatttacagccaggcatggtggctcatgcctgtaatcccagcactttgggaggctgaggcaggtggatcatctgaggtcaaaagttcaagaccagcctggccaacatactgaaaccccatctatactaaaaatacaaaaattagccaggcatggtggcatgtgcctatagtcccagctacttgggaggctgaggcaggataattgcttgaacccgggaggcagaggttgcagtgagctgagatcgcaccagtgcactccagcctgggcaacagagcaagactctgtctcaaaaaaaaatcttatttacaatagcattaaaataaatttctgagaagaaatttaatcaaagaggtagaaaatctttacaatgaaagatatatcaatgagagaaattagaaaagacacaaataaatttaaaaatatttcatgtctatagattgaaagaataaatactgttaaagtgccatgttggccaggcacggtggctcacacctgtaatcccagcactttgggaggctgaggcaggcagatcatgaggtcaagagatggagaccatcctggccaacatggtgaaactctgtctctactaaaaatacaaaaattagctgggcctggtggtgagcacctgtagttccagctactcggagggactgaggcaggataatagcttgaacctggaagggagaggttgcagtgagccgagattgtgccactgcacttcagcctggagaaagagcgagactttgtctcaaaaaaaaaaaaaaaaagtgccatgttattcaaaatgatctatagattcaataaactccctatcaaaattccagtggcgttttacagtaatgaaaaatacaagtctaaaatttatatatgaaactacaataaactttgaatagtgaaagcaatcttgagaaaaaaaaaacaaagctgaacgacatcatactttataatttcaaactatatttgaagactatagtaatacaaacaggacggaatatgcagaaaaatgaacaaaaacctactactctcacacatttcagagatgatgcaaaaaaagaacttaacagagtttctcaaaattatgcagatatttgtgtgtcccccaaaacaatggaaaagcagtcagattgtgcagtctcttacatgccattaaggagactttggctctcactctaaactagaaggcagatcactgaagggaaagcagagtcctgagagaacttaaaagcgtaagacagaagactcccttatgtgagagcaaaatagaaaaactcggcagggtggcgtggctcatgcctgtaatcgcagcactttcagaggccaaggcgggcagatcacctgaggttaggagttcgagaccagcctggccaacacatagtgaaaccgtctctactaaaaaaatacaaaaattagctgggcgtggtggcacacacctgtagtcccagttacttgggaaggtgagacaggagaatcgcttgaacctggagatggaggttgcagtgagcccagactgttccactgcactccagcttgggtgacagagcgagactccatctctcaaaagaaaaagaaaagaaaagaaaaactctggctttccagaaactatttcctttggaatacagcttcccaaatcacattataagcactagctttttctttgacctttgaaccgctcatctatgttatctgttgtattcactttcactctcacctacctgggggttcggccaccatcctatgtctctttctagtccaaggctctttttcttgttccagacaggtgatcaggtctggcttagagacaacaatacctgttttattgaaagtaaataacataaatcttgcttatattgtctaatcaccaacatggcaatgtagtcagtaaagagggtgaaatagaatattcttgtaaatcaatcccaaaatactgatttataaaagaaatttctaaatatttagaaaatattttaaatttgttagttcttaatttcactgtccagtacaacaaatcaaaaactggtgttggcaattagattttaaagtgtgagcaataatattttatgccactaaacttctggaattaccactctaatctagagtgaagaatacagattagctcaggaatgcagaaagttcaggtcaagatgaaatatcttgaagaaattcttttctacagagatgaatccctaagatttttataaaaacagggatctgaaactcacttatgcaaagcataaattacctaaaaacattatacaaaaaagaaaaatgaaacctttagggtataataggaattgtatattgaagttatcctcacccaagaagaccaggtttctgtagttctctaacatcacattcctatataaattctgctgtatagtgtccaggcattgccactcctccagagagaattctatggccacatccctaaatttcaatggttcctgaaaaacacacacacacacacacacacacacacacacacacacacatacacatttagaaagtggccatggaaagaatttataatttgattcaaggtaaaataagaaagtgaagagaactggttctgacttacagaaatgactgaaattatccaataaaataatttttttttacacaggaacattctctaatttgttctccaaccatgagaaaagaaagcggcattagatctataacaccagacctaaataaatcgccagtcagaatggcgattatcaaaaattcaagaaacaatacatgctggtgaggctgaggagaaatatgaatgcttttacactgttggtgggaatgtaaattagttcaaccattgtggaagacagtgtggtgattcctcaaggatctaggaacagaaataccatttgacccagtgataccatttctgagtatatactcacaagaatataaataattctactataaagacacatatgtggctgggcgcagtggctcaacctgtaatcccagcactttgggaggctgaggcgggtggatcatgaggtcaggagatcgagaccatcctggctaacctggtgaaaccccgtctctactaaaaatacaaaaaattagccgggcatagtggtgggcacctgtagtcccaactactcgggaggctgaggcaggagaatggcgtgaacccaggaggcggagcttgcagtgagctgagatgatgccactgcactccagcctgggcgacagagcgacactctgtccccccccaaaaaaagacacatatgttattgaatcactatttacaatagcaaagatatggaaccaacctaaatacccatcaatgatagaatggataaagaaaatgtggtacatacacaaccatggaatactatgcagccataaaaaagaatgagatcatgtattttgcagggaccatggatgcagctgaaagctattatcctcagaaaactaacacaggaagagaaaaccaaacactgcatgttgtcactcattagtaagagttgaacaatgagcacacataaacacaaggagacaaaccatacacaccagggccagtcggggggtggagggacaaggagagaaagagcattaggataaatagctaatgcatgccaggtttaaaacctaggtgatgggttgataggtgcagcaaaccaccatgacacatgtacacatatgtcacaaacctacacgttctgcacttgtatcccgaaacttaaagtaaaatagaaaaaaaatatattataaaagactatacttagaaataaatgataataaaaattatacaaaaatttattttttttttgagttggagtctcgctctgtcacccaagctggagtgccatggcgtgatctcgggtcactgcaacctctgtctcgtgggttcacgcaattctccgacctcagcctccagagtagctgggattacagatgtccgccaccatgcctggctaatgtttgtatttttagtagagatgggctttcaccatgttggccaggctggtctctttgccaggctggtctcaaactcctcacctcgtgatccacttacctgagcctcccaaaatgctgggattacaggtgtgagccacctcacctggcttataaaagttatacaagctaaaagtgctgagatacaacaaaaagaaaaagaaaaaaaattatgttacagggcactgtgcctgggataacacattatgtaatttaatttttataacaccctgggagctggtactgtttaataattcccaggatttagatgaaaagcccggcatttttatttcttctgtttctctgtcattgattttttttaaaaagtatacacaataaaagctaaatatagacagagaggaatgcggaaagaatttaatgtattttagagaaatttatattgtgtctgtttacttgtttgtgacttgtagagcaactactagatctgtaagaatagaaaacaagttgctagatagaatgcaagcactagttttaataaaaaattataaccataaaatatatactttatttttttaatttatctgcttttgtgtttcaggaattgtaagcaccagccctagcagcagaattcaccagccaaaactccgatctccaaaaatcagttctatgaggcaagacttaagggtagggccagacctaaataaggcctccaaaaaggtgaacctgagcagaactggggcagggagtggactctatatagaattctgttctctatgccactggggtatttccagttctgtttttcctaaacttaccttaaaaaaaaaatccttaaatctcagagtttgtataattttaatctttcttagaccctgccctatcaattatatgacatatactaataagcaatttgaacacatttataaaggttttctagggtaattttattaaaagataaatatgtattaacaaggtaaaagaaatggaaatagaaataattcttctgtctataaatatcccttcaggtgatgacatcgcaagtcacaattatataaagtggcacaaatagagcccaaattttctgcacacatctatttattgtaccaattatatgatgcttaatttaaccatttatccagttgctagactaaaagctcctggattgtagggaccatgactgcttcatctatttttctaatggccatatgaaaagaaaacaatttagccgggcgtggtggcaaatgtctgtaattacacctactcgggaggctgtctcggcctcccaaagtgctggaattacacgcgcgagccaccgcgccaggccttttgactctcatacatttttaatgaaaggaaagagagactaggaacgccacggaccaaagctcttcccattcatgaacccggcacccgtcaggattcgcccctgacgaccctcccgtggtccctgcacaatctgggagagacccggcgctgcggatgcagagccacccagagagagctgcaggccaggacacagtcactgagcagggaggagaaaggacgcccggggggctggctgtcagcgcagccgccatcttatggtccaagtggactgaggccgcctgggcgaggagaactcagggcgcaaattgtggagctgactgcggcgaggtctgagtcccgccacagccccttcccctctctcgggatgtcggacccgacattctcaccatttctaggtttccgggggacctggcgtcttagctatggatcgccaatacctgcaggtcagagggccatagaggctgggcctctagaagaagaggacacagagcagtgaagacgagacccggagctcgggctgaagggagagacaaaggccccgccaatcccggaagccgccctgtctgctccagctgcatgcctgattggacagttcccagcccagcgtccctgactggataatgattaaaaccccacccctcaggtcctgagtgacagaagatgtgatcagatgctctgctgaatgaagactaacaacgtaagttgcagcgttttcagacagggctccctccctgagctaagccaggcccacccaacagggtatttgcctttaaccttctgtgtaaggtcacatgcatttcaaataatatactagatagctattcaaaaataaaaatatatataataacaattattttaatatttcatcttttatgaccgtcctggtttctggcagccatagtccctaccccgacagcccccagcccagatggcattcaaatcttcctggatgggcttgatgcccgtcactcacgcgctctttagcactgcgttgtgttggttactcaggcctgggagaggtggtggggattgtagatccagggtaggagccaccttacacccagagttcacctggccacatgccagcaaggaagcccatgaagcacagccctagacactgagcctcggcacctccagctgcactttctatttatatatcaggtttttttttttttttttttgagacggagtctcgctctgttgcccaggatggagtgcagtggcacaatctcagatcacaacaacctctgcctcctgggttcaagtgattctcttgcctcagcctcccgaggagctgggactacaggtgcgtgccaccatgcccggctaatttttgcatttttagtagagacggggtttcactatgttggccaggctggtcttgaactcctgacctcgtgattggcccgcctcagcctcccaaagtgctggggttacaggtgtgagccaccgcgcccggcctatatatcaggtttttaaaaccataaataaacagacacaaaagcagccactttgattgaggagaaagtgggagcctaaagcagctgaccctcaaacagctttgccaagcctcaggccaggccaggccatctcaacactccaaggctacatgatagttacagaggacgacagttcccataggtacttgtcaagcactgtgctagcttctcagtcacagagtctcagaatttctccttgccaataccctgtgaggggaggccctaactcactagagcacaggaggttcctaagctcttcccaggaaatggttaacaaagtgtggagctgggggaaaacccagtcagaacaaatgacttcccagggtctcccttgactccatccctatctccacatggggccaggaggtgaagcgagccccctaaccccctccattccactctctcctcaaagtggctgtttttgtgttttcttatttatgggatttcaaaagcctgatttttaattttgagtagtttcaggcttgtatgggtgtatttgtataggctttattagaaggaagagggcttaagacaataacatttttaaaatgtctcagtggggaatagacttccatgtcatgaacgatgatgttgacctccttctgctgtctttgtgcaaagtataaatagtgtgagaattggcatgtgctgggttgtggtttcagtgtgggagggcagttccttaagatggaaaccaaatctcaccgagctgtagcagccacactcaccttttatcacattccccaccatagtctttcacttttcttctgtgcttaaatttctttcaacatatatatatatatatatatatttttttttttttaagacagagtcttgctgtgttgcccaggctggagtgcaatggtgcagtctcggctcactgcaacctctgcctcccaggttcaagcaatcctcctgcctcagcctcctgaataattgggattacagatgcgtgccaccacactgggctaatttttgtatgtttagcagagttggggttttaccattttgggcaggctggtctcgaactcctgacctcaggtgatctgcccacctcggcctcccaaaatgcagggattacaggtgtaagctaccatgcctggcaaacatacatattattttgattatatatatagggtgtataaatatatgtgtgtatatatatatacacatatatatagggtatatatgtgtatatatatatatgtttgtgtgtgtgtatatatatatgtgtgtgtgtgtgtacacatagaggtctcactctgtcatccaggctgaagtgtagtggctgaatgatgggtcactgcagcctcaacctccagtgatccttctacctcagcctcttgagtaggtgagactataggcaggcaactccacacaaggccaattttctaaatttttgtagagactgagtctcactacattgcccagactggtcttgaacccctgggcttaagcaatcattccaccatggctttccaaagtgtttggattacaggtgttagccatcaaacccagccaacaatattttttaaagaactgttacaaccaaattatgagctatggttgtgccactgcattccagccagagcaccagagtgagaccttgtctccaaaaacaaaacaaaacagaaacacttatgaccaaattaaaattctaaggttgtgtcctctgtgtccccttcttgccctgtaaactatcactgttaaatataatgcgtattgagaaaactgttagatattattaagaaattcctatatatcttctaagtgagataaggtattctaatgtgacccaatatttcctcacccctacctccagggtctaaactagcaaatcaaatcaggacatccacaaaggacagttggccatgttcaattagaaaattaaatatccccgttagtgagagtaatccagtgattttaaaaaagagaagtcaaactgaaatgcagcgtagtcacggcacaattaccctggaatagccacttcacatggaatgactgaggagcctttctaagatgaacaaatttgggtaacgtaattctttctttctttctttctttttttttttttttgagatggagtcttgctctatcgcccaggctggagtgcagtggcataatttgggctcactgcaacctctgcctcccgggtgcaagcagttctcctgcctcagcctcctgagtagctgggattataggcgtgcgccaccacgcccggttaatttttgtatttttagtagagacggggtttcaccatgttggtcaggctggtctcgaactcctgacctcgtgatcagcccacctcagcctcccaaagtgccgggattacaggcgtgagccaccgtgcccggcccggtaacataattctttctaaaccattctcagcctgggctgcctcccacccccgccttatttctaatggccatcccacgatgtggtcagcagtgtggtacggcatggtgagagaggcgctcagggatgggatgaaggtctttcccgcattatgaaaatgattaaaaaatgtccaaatgggcagggcgcggtggctcatgcccgtaatcccagcactttgggaggctgaggcgggcggaacacctgggatctggagttcgagagcagcctggccaacatggtgaaacctcatctctactaaaaatacaaaaagtaccagggcgtggtggcatgcgcctgtaatcccagctactcgggaggctgaggcaagaaaatcatttgaacctgggaggaggaggttgcagtgagccaagatcgcaccactgcacttgagccagggcaatgaggcggaaactcggtctcaaaaaaaaaaaaaaaagtccaaatgttctttcttacccttaagtagcaaataagatgcattatacaagacccaggtaaggaaaagagcaagtgcatttcatgtctcagcttacttcttaattagctgtaattccctgtgcatgttaccttacctttactgtccgtaaaatgccctactgccgagcggggcgggtggtggtatggagagaatgctgttgctttatccaatcagtggcgctggcgcgggaaccgcccaatcaggggcgcagccggagaggagggcgtggcttccgacattccgcggggtctttacctcttgctcccgccagagtttgggatcggtctcttctgttccgcgtcctccacctcggtagcccctggtgactctgttacagcctctgttgacctatgatctgcagggagacgcacagccaggacatcctggaacctgggaaagggtgagtgtgcggggttgggcaacccgagaagggagaccaggctgtgaaaccagcagaaccggcctctccacagtccgctcccaggtcgccgacctgagtccccgctggcgcagctccgtcccaggcccctctggccgcaagatggcggctgggcccacagccgggaccccagcgtccagccccgtccgtgcggggccatgtctggagccccctgagcaagctcttcacgcagcctcgagtatttcccaggttgttcagggatgccaggcgggtcataagagcagaatcccgacccggtgtttgcgtgggaagaactgcagcctatggggctcccagtgtcttttgttaaacattttgtttgagacggagtcttgctctgtcgcccaggctgaagtgcagtgcgtgttcacggcaacctccgcctctcaggctctggtgattctcgtgcctccgcctcccgagaagctgggattacagacctgcgccaccccgcctggctaatttttgtatttctagtagagaagtggtttcgccatggcggaaggtggtctggaactcctggcctcaagtgatccgccagccttggccccccaaagtgctaagattaggaggagcatgaggcactgcgccaagcctcttctcttaaaaattaaagggagtcagggttaaaaccttaaagaggttatttgagccgtgattggtgaaatggaaagcaccccagccatagtatgtggcccacctgagagacataaagcaaagggttttataaagggcgtgtgagaaggcaaaccaaatgcaagaattggttagttatgtagtcaccttatttgtatgatacaggtggaaatttcctggttatgtaatcagaggttaattgcaggtttatgattggttaataaaattcaattatgattgaattttgtttccgcctaaaatagtaatctataagatataaactcgagttaggttttacattttttacttatgaacacagggcactagggccacttcagtctaatttcctgctttttaattactttaacactccacaggaggaggactggttttcctctgtgacttcctaatgtatggcaagcaggacttcttctaatccactaccctcttcccctagcttaactaaggcttgcagtaaaattataaatttccactttctttcctacattctcaaatgtaggaaatgaggacaaacaacttcctctctccaatttacaacactatcaactatttgtcctttattgtgcatttcagacacagtgttttaattgttaatcatgtttttacactgcagtggatggcaggtttttaaagatttgttttctgtttgtaaacacttttttattggagacagagtttcattcttgttgcccatgctggagtgcaatggcatgatctcagctcactgaagcctctgcctcccaggttcaagtgattctcctgcctcagcctcccaagtagctgggattataggctgccaccactgtgccctgctaatttttatattttgagtagagagtgggttttgtcttgttggccaggctggtcttgaactcctgacctcagatgatttatctgcctcagcctcccaagtctgtaaacattttatgtgagaaaaaaagtagaaaataatcctctggaactccactttaaaaaaaaaaaaaagtctgcgcctctccttcttttatcttccctaggcacacacaccctactagtacgtctttgggttgaagttttgctttggagaaattacagggcctttacagcagccctttagtctattcttggtaatgagtttcagaactgtctggggtaactcaacatacccacagtggccatatatcttggagtgtctaatgagtatcatcccctgagtcgtctcttagaggacagtctgaggagtaagagtgtagcctctcagaagagcaactggatggcctaggcctgtggaaaatttccttgtatactatttgtctaaaaagctaacctcttagaaaattaaaattattttttcacaaaggaatgcttctacactgttggtgggagtgtaaattagttcaaccattatggaagacatggtgggaactccctgaagacctcaagacaggaataccatttgacccagcaatccattattgggtatttacccaaagcaatatgaattattctattataaaggcacatgcatgcgtatgtgcaccgcagcacacttcacgatagcaaagacatggaatcaacctaaatgcctatcagtgatagactggataaagaaaatgtacatataaaacatggagtactgtgcatctataaaaaaaaaatgagattatgtccattgcaggaatgtggatggaactgtaagccattattcttagcaaactaacacaggaatagaaaactaaataccacatgttctcattataagtgggagttaaataatgggaacacatagacccgtagaggggaacaacacatactagagcctattggaggagggagaggatcaggaaaaataacttatgggtagtaggcttaatacctgggcgatgaagtaatctgcacaacaaacccccatgacacaaatttacctatgtaaaaaatttgcaatgtacccttgaacttaaaagttaaaaaaataatttgttagcttttccaataattccctgatagcgttttgattttatgtgtgtatgacacctattatgtatcagaaatttggattacacagatgaacagggttcaacatacctgccgtgtaggagtttatagttcattagcatggataggtgtgtaaaaaattaatttattctggagaataatacttgtacataaaaagacataaggtattgagctgtaaggtaatagtgatcaattctgccactaacatagcagtgggaatatcaaggagggctttatagaagaggtgacatttgagtgggtgtcattgtttaatagaactttttgtattaatgttgctggtgcggatatttcatttcctttttttttttttttttttttttttttgagatggagtctcactctctttcccaggctagagtgcagtggtgcagtctcggctcactacaacctccacttcccaggttcgagtgattctcccaccgcagcctcccgagtagctgggattataggcatgagccactgtgcccagcctcagagtgtaccctttaaaaaattattttaaaaaaattttacctcttgactctgaaatatattgagaggtcttcccccaatgagataaaaatgaacaagtgtgtaaacagttaagaagttttttctcaagctaattttttttttttttttttgagacagagtcttgctctgtcacccaggctggagggcagtggcgcgatctccccggctcactgcaagctccgcctcccgggttcacgccattctcctgcctcagccttccgagtagctgggactacaggcgcccaccaccttgcccggctaattttttgtatatttagtagagacagggtttcaccgtgttagccaggatggtcttgatctcctgacctcgtgatccgcccgcctcggcctcccaaagtgctgggattacaggcctgagccaccgtgccgggccaaatgtttttttttttttttttgagacggagtttcgctcttgttacccaggctggagtgcagtgtcgttatcttggctcactacaatcttcacctcctgggttcaaccaattctcctacctcagcgtcctgagtagctgggattacaagcgcctgctatcaaggccggctaattttttgaatttttgtttgtttgcttgtttgttttgtgtttttgggagacagagtcttgctctgtcatccaggctggagtgcggtggcatgatctcggctcactgaaacctctgcctcccggtttcaaaccattctcctgcctcagcctcctgagtagacaggtgcgtgccaccacgcccagctaattgtatttttagtagagacggggtttcgccatgttgcccaggctgttctcgaactcctgacctcagattatccacctgcctcgccctcccaaagatttggggttacaggcgtgaaccacggtgcccggcctaattttttgtatttttagtacatacggggtttcattatgtttgccaggctggtctctaactcatgacctcaggtggtccatctgcctggggctctcaaagtgcagggattacaggtgtgagccaccacgcctggcctctcaacctgatttttatttttagtagacacattggtgatgagacaatcaaatgttcgcattgatgagaaaaggcagaaatgatttttgttctctggattcttgaaataaaattttttccaaaggacaagaagatcccatcccagtaaggcaatgcaagaacctgcaagcaaaatgtacctgagactcacagtggggtacaaagtgtctcctgggaaggtggtcactgagtaatttaataggcaggatggggatgacagaatattttgagtgatattatggtctgacttgacagtggagtcagacatgtttgtgtcccaatcagcactgccacttcctgagtttgtcaccttggaaagattttttcacttatttcaatttcagtttttttttttttttttttttttgagacagagtctagctctgtcgcccaggctggagtgcagtggtacaatcttggctcaccacaacctccgcctcccgggttcaagctgttctcctgcctcagcctcctgagtagctgggattacaggcgcccaccagcatgcccagctaatttttctatttttagtagagacggggtttcactgtgttggccaggctggtctggaactcctgaccttatgatctgcccacctcagcttcccaaagtgctgggattacaagcgtgagccaccacgcccggcccaatttcagttttttaataactgtaaattacatttcatcagaagagcttaaaagatgtttaaaaagtcaacgactatgaaaggtatatttcagaaaaatctagtgatatgttttatttgttaaatttatgtttttttctggttgtgtaattttaaatagaaccccaggggtttgctttgagaatgctaccagagaagagaaataggaaaaatcttttttccattatggctatacaaagtgaatacatttccacaagcaaatatgatagattaattggtgcattgtatatatttctcaaaccatcagctcctctttttttcaaagtctagaatttgtaatggtggatatctctgttctgtattctgttgtctagatatccaagtttaatgcaaaattttatgacatggaacttgacactttctagaaatgttcacatatggttgtttattaaattatctctcatggaaatatttaaatgacatgtttattgtctgaaaaggacagatatttaagctttttttttttttttttctttttttttgagaaagagtctcgttcttttgcccaggctggagtgcagtggtacaatcttggctcactacaaccttcacctcgcaggttcaagcgattctcctgcctcagcctccctagtagctgggattacaggtacacaccaccaggcccatctaatttttctatatttagtagagacagggtttcaccatgttggccaggctgttctcaaactcctgacctcagccaatccgcccgcctcaacctcttaaagtgatgggattacaggtgtgagccattgtgcttggccccctttaactattttatgtgactcttctctcttacctgaacgttgcccaaaaagagattgtgacatatatttgggcccagcaccaaggtgatgtaactctcctcttcagccgggccttgcccacagaagagagaatgacttattcctgagtttagcatacaggtgatttgattcttctgctgactcccagaagtcactgtaacatatatctgggtccatcgctgagactgtgtgactctcttctccctgggacctgtccacagtggggattgtgacgtattgcttggccaagcacctacgtgatatgactcttttcttaggcctgggccctacccactggagtgattttgacacattgctgggcctagctcaaaggttatatgtgacttcacacttcttcctgggccctacccatgaggggcactgtgtcttaactctgagacacttaattaggtgatgtgactctcttttttcgagatggagtctggctctgtcacccaggctggagtgcagtggcaaaatcttggctcactgcaacctccacctcctgggttcaagtgattcaactgcctcagcctcatgagtagctgggattataggcatgcaccgccacagtcagctactttttgtatttttagtagagatgaggtttcaccatgttggccaggctggtctcaaattcctgacctcaagtgatccacctgccttgacctcccaaagtgctgggattacaggcgtgagccacgatgcccggccgatgtgtctcttttgtttggaccctcttcttgggatattgtgacatattgctgggcccaaaatctaggtgatgtgactctactctttggtctctgcccaaaaagggattgtggcatatcactgggtcaagaacctagatgaggtgactctcctctccagtctgggacctgcacacattgtgtgttgagacatatcactgggtctaacacctaggtaatgcaactctcctgcaagggccccgcccacagaagtattatgaaatatctttatattaatcacctaggtgatgtgacactcctcttctgcctgggaactgcaaaaaaagtattattacatatcactgggcccagcacctaggtgatgtgactctttgctcatgcatgtgctctgcgaactggggtgtttgttacatatagttgggcctaaaccctaggtcatgtgattctttcattttcctgagccatactcatagcattttgacatatttttgggcccataatttagatgatgtgactctcttgcatgggccctccccataaaggtagtgtgacatattgttgagcccagtacataggtgatgtgactcatagttctctatggattgggctttgcccaagcagggattgtgatgtgttgctggactcaccacctacgtgttatgactctcctcttctgcctaagccctgcatgcattgtgtgttgtgacatatgcctggattcagcacttaggtgatataactttatgacatgggaactgcccatggaagtattatgacatgtctcctttccatcacctaggtgatgtgacccttttatttttcttgtttctggcatattttgggtatagtgacgtatcattgagttcaacacccatgaaatggaggcttctgcctgagcccagcacataagtggccttgtgaaatatctttgcattcattatctaggagatttaaccccccttttctgcctgcaccctgaccactgggaagattgtgacgaatcaccggtctcagcaatcaggtgatctgtttttcctgcctggtccttgcccacagatcattgtaacatatcactgggcctagcatctaggtgatgtgactctgctgactgtattctgctttcagggggagattttaacataaccctaatcaagcacccatgtgtgggtgtggcacttctgccttatccctgccctcagagaagattgtgacatatcactgccccaaaatgcggtgatgtgagtctactggtcaatacctattcactggtgggattgtgatgcatatcttatccaaacttacaggtgcaataatgactctcatacctctaaacaaccagtagcagatgtagtttctctcatagccagggtcaggaaaatgagtaatatcctgggcctcctctttgtatgaaggtcataaagaattaacactctctcacatactgtgtaaagttgtcaagaggtacagagaatgtcctaacagaactcagcacacaggggaggttgtgacactcatatgcatagcctgccaacagtaaagactgtcatccttccacataaacacagctcaatgttgaggttctgaatctcatacccagctgcagtcaaaagttggaaaattgaatgtcatgttaattcagtccatagagaggtcagtgtctctgagaccaagattcagcacatgtgtgagttgttgacttcaataaatgacacaatttgcaggagggattgaggttttcatacacaaatccagaccgtcattgagactcattcatgtacttatacccaacatacagagggtattatgtctcatacctagaactaaaaaaatgtgtgaaattgttaatctcatacctccaccttcatccagatgtgattgtgacatacaattctgcccagcaactgagtgatttgactctcctgcctgggcccagtgtacagacggggttgtgccatattgctcaacccagcatttaggtgatgtgaatctattcttttgtcctagtgcttttcacagagggcattggacatatcactgtgagtaatgtccaggtgatgtgacttttctctacttcctgggcttttcccaagaagggactgtaatatatttctgggtccagaacctaggtgatgtgactctcctctcctgcctggtttctgttgtacattgtgttattgacatgtggctggttctaataccttggtgatgtaaatctcctgtatgggccctgcccacagaggtgttatatcttttcattcatcacctaggtgatgtaattctgtttttctgcctgggccctgccggaagggaggattgtggcatatcactaggcccagcacctaggtgatatgattcacctgtttttcctgtgcctcacatattttgagtactgtaaaatattactagacctaccacctatgggattgcgtgctcctgcctgggctctgcccacagggacattgtgacatatatctgcatccatgaagtaaaagatgtgacatttcttgcctgcaccctgccctgcacaggaaagattgtgacatatccctggaaccagacacaaggtgatttggctcttctgcctctgtcttgcccccagggagcattgtgacagtgctgtgactctgttgcctgtgctgtgctttcaggagagaattgtaacatatccctggctgagcacctaggtgatgtgacactgctgcttggttccttccctcagggaagatatccttggctgaaatcccaggtgatgtgactctcctcctaactccctacctacaggttaaatggtgacatatactatagtcagcttataagtgcgatgattactctcataactcaagtcagctattagaagaaatagtgtctctcatagcttgccttagatgagtcacatccttggtctctctttttatgaaggtcataaagaattgccaccctcccacatatcatataatgcccttgagtgttacaaagagtgttatcccagggcacagcacaaaagtgagcttgtttctaatatgcacacctcgccaaccattaggattatcaccttcacacatggaaagagcccattgctgaggtcttgaatctcaaatgcaaacactgtccacagttggaattgtgactgtcatatatgagcctccagccacagttgagatggtgacacatttctaaactcagaacatagcagatgaggactactatccaaacccaaccaactggagagatgtttaccccaatacctgggcttagggccagaagtatggtcatgggtgcttacaaacatgattttagagtaaattgtgactctcatttatactggataaagccattgagtagtacagagagtgtactagccgggttgcattgagttgagatcgtgccactgcaccccagcccaggtggcagtctgagactccgtctcctcctgtgtgtatgtgtgtgtatatatatatatatatttttattttggatggagtatctctctgttgcccaggctggagtgcagtggcacgatctcagctcactgcaagctccacctcccaggtgcacgccattgttctgcctcagccactccagtagctggtactacaggtgcctgccaccacgcctggctaatttgatatatatatatatatatatcaaattttttttttttaagacagagtctcactgtcacccaggctggagtgcagtggcgtgatctcagctcactgcaacctccacctcctgggttcaagtgattctcctgcctcagcgtcctgagtagctgggattacaggcacgcaccaccatgcccagataacttttgtatttttagtagagatggagtttcaccatgttcaccaggatggtctcgatctcctgacctcatgatctgcccgcctcagtctcccaaagtgctgagattacaggcgtgagccaccacagccggcctggagatttttactgttgtatgaacacacatcaaatagcatacatcatcattttctcacataaacatagcctactcttgaagttctgactctcacacatagaggtagtcagaggtggaaaaattgactctcatatgtggattcagtttgcaggtgagttgatgacacttagagcaagattcagcacacctgtgagtctgtgacttcactaattagacaaagtccacaggaggagtataggctgtcaggtacaaatttagttcatcgttgaaattgtaactcctgttcttagacacaatatataggaagggttaacttcctattcctaaaaccagaacatgtgtgggattgttaatttcatccctgcaccttcctgcaggtttaattgtaacattttcagcacctgagtgatctgactcttgcctaagaccagcccacagatggaatagtgacatattgctgaaccctgaactgaaaggatgtgactctatttttctgtgttggtgctgctcacaggggacattgtgacatatcgctgggccttgcacttaggtgatgtgagtctcctcctttgccttggcactgcccacagaatgcattgtcacgtatctctgggccccacacccaggttatgtgactctcctgactgtcccctgaccacataagcaattatgacatattgctgggtccgactctctggtataactctactgccaacaaggagcattgtgacatatatttccactcatcatcaaagtgatgtgactctcttctcctgcctgttccctgctcacagtgggagttgtgacatatcacttggctccgtaccaaacaaatgtgattcttcttccatcatgagttctgctggcaagggagattgagacatattatggagctctacaccaatgtgacattactgttttgcctgggcctggacctcagaagccattgtgacatattactgggctcaacaaggtaacatgagtctcctgtatggaccctgacaacagagcattgtgacatctttaagagcatcaactatttgatgtgactctccttttacacaaggcttccctcatatgagagattgtgacataccttctggcccagaaatcagatgacatgtttcttctgcctgagctttgcttacagggagcattgtgacatatcactggtctcagcacccatgtgatatgactctactgtctgtgccctgatttcaggaggaaattgaacttatccctgactgagcacccaggttttaactcttctgcctggtgtctgctctcagagaagattgtgacatatccctggcctgttacccagatgatgtaactctcctgctcactccctatccacaggggagattgtgacatatacctttgttcagatcataggtgtgatgtttactctcatatcaaaaatcagccaataagagacaaactatctttcatatgtgggcttgggaaaatgagtaagattctggctctcccctttgtaggaaggtcagagagaattacactctcacatattgtatgaagccccgggtggtacagagagtgtcctaacaggttgcagaaaacatgagattgtttttgtgtatgcacactttgccagttgttaagattatcaccttcatccatggacagagcctactggtgtggtcttaaatcttacaggtggatgcagtgcagagttgaaattgtgactgttgtaagtgaacatcaggcaacagctgaggtggtgacttattaataagcctagcttataggtagatggcaactctcatatctggacccagccattacagaggtgttaactctcatatctgggcatagagccacaggtacgatcacgggtccatagcagcagaaaagtctcccagccacaaaagattgcgactctcacgtgtaccttataaattcctcaggtggtacagagagtgttctaactaggctcagtgtagagtttaggttttcacactcatgcacacccagccaacagtaaagattttcatcttttcacatgaacacagtccactggaggttctgaatctcatatgcagagacagtcacaagttggaaaatttactctcataagtgaattcagtccaaaggtaagttggtgactttcagaccaagattgaacacacctattagtctgtgattccactaaggtgacacagccagtaagagggattgagtctgtcattcagtgattcaattcattctaaaaattgtgacttgtgtgcttagatccaacatacaggaggtgttgactttcataccaagaactggggtatatacaggattgttaatgtcatccctggtctttcctgcaggtgtgattttggcacacacttctgcccagcaccttagtaatgtaattcttcagaattggcccagcctacaaataggattgtgccacactgctggacccagcgcctaagtgatgtaactctgttctgccttggtgctacttgaaaaagacattgtagtatatctcagagccttacacccaggtaatgtgagtctcctctcatgccttgctgctgcacacagaagcaggatatgcacaggattgttaatctcatcttggaccttcctgcacgtgtgactgtgacagatgcttctgtgtagaacctgagtgattttactctcctgtctggatttaacccacagatgaatcgtgacatatcgctggaccagaaactaggtgatgtgaccccattgtcttgcctctgtgctttccacatggggcatttggacatatcactgtgccttgcacccaggggatgggagttttctctcctgctttggtgccatccacagtgaacattgtgaaatattgctgccctcccccctagtttatgttactctcctgcctctgctttgctcacatgggtcattgtgacagtgtgacatactgctgggtctaaaactcaggtagtgtaactctcttgtttgggttctgcctgcaggagccattgtgacatatctctgtgctcatcacccaggtgatgtgactcccttttactgcctggtttcttctcacaaaacatcttgtgacatattgctaggccccatacctagctggtatgactcttttaggctccacctgctgcagagattgtaacaaactgctgggcccagcagcataatgatattactcttttgccttgggcctgccctcagaaagcactgtaacattcatgggcccaatgccgaggtgatgtgtgtcttcagcctggaccctgcccacagggggcattgtaacatatcacttggctcatcagatgtttgatgttatcccctcccctctcctaccctgtgtttgcctataagagacattgtcacaagtttctgggcccagcacctaggtgatatcttcctgggacctgccatatggggattgtgatatatcgcatggcccagtacttacttgatgtgactctcctctcatgcctgggccctgcttacaggtgtgattgtgacacatagcttggcctagcccctaggttatgttactctcctcttatccttcagttattttcacaaggggcattgtgacatattgctggactgggaacccaggtgatgtgactctcctctactgcctgaaatacaaccaaaaagaaagtttgatatattgcttggccaggatcctaggtgacgttattcttttctcctgcctaaaccctgcatacattatgtattttgacacatcgttgaggccaacacctaggtgatgtaactctcctgcatgggctttgcctacaggggtatgatgatgtatcttttcattcatcacccaggtggtatgactctccacttatgcctgggccttgatgaaacagaaattgcgacatatccctggacttggcacttaggtgatgtaactcacctttattgccagggcatggaatattatgagtattgtgacaaatctcttggcctgacacctaggggatgagagactcctgcctgggccctgcccacaggatgctttgtggcctgtcttctggttttattacctagaaagatgtagatgtgactttcctcttctgcctgcattcttcccacagagaagattgtgacatcactggacccagcaattagaaaatgtttctctcctgcctgagccttgcccacaagaacattgtgacatatccttgggctcagcacccaggtgatggaactctaccacctgtgccctgtctacttaggctattgtgaagtatagctggtttcaatacccaggtgatgtaactctcctgccaggccactgccttccagtgatattgtgacatgtctttgtgccaatcacccaggtgatgtgaatcttttcacctgcctggtccttgttcactaggggataataatacatattgctggtttcagcaccaagctgatgtgacttgtctcttcttcgtagattctatcccccaaaaaactgacatatcactaggcccatcagcaaagttattttgcctggtcctgcccttaaaagacattgtgacatattgcagtgaccagaaccaatgtaatttgtctcttgcctaaaccctgcctactgggggaattgtgatagatctcttggccaatcaactgtttgatgtgactttcctttgtgggttttttgttttgtttttgatggagtttcactcttgtttcccaggctggaatgcaatggcgcaatctcggctaaccgcaacctctgcctcccaggttcaagcgattctactgcctcagcctcccaagtagctgggattacaggcctgcaccaccacgcccagctaattttttgtatttttagtagagacagggtttcttcatgttggtcagactggtctcgaattcctgacctcaggttatctgcccacttcggccccccagagtactgggattacaggtgtgagccactgtgcctggtgactctgttttttaaccagggctttgccaatagtagagatcgtgacctatctctgggcctaacacctagatgttatgactttcctctcctgcctggtccatgcccacagaaaagagagtgacttaccgctaggctcaacacacaagtgatgcgattcttctgcatgatcccagcccacaccgcttactgtgacatctctagacccatcacctggatgatgtgactcttcttcttgggaactgtccataatgaggattgtgacacatcacttggcctagcacttatgtgataagactcttcatttgcctgggccgatcaatttgggcgactgtgtcatatagctttactcagcccctaggttactctcctgtttttcctgagtcctacccacagaggtcattgcaacatatttctgagcccctcatttaggtaatttgactgactctcctgcctgggccttctgctcagtgatttttgtgacactttttttttttttttttttttttgagacggagtctcgctctgtcgcccaggctggagtgcagtggcgcaatctctgctcactgcaagctccgcctcctgggctcatgccattctcctgcctcagcctcccaagtagctgggactacaggcgcccgccaccacacccggctaattttttgtatttttagtagaggcggggtttcactgtgttagccaggatggtctcgatctcctgacctcatgatccacccgcctcagcctcccaaagtgctgggattacaggcgtgagccactgcgcccggccatgacacattttttgactgagctcctaggtaataagactcttctccattgcttggactctgtcagagaaggtattgtgatgtatcactgggcctaacacctaggtgaagatactgtcttctcctgcctggacactccataaattgtatattttgatatgttgctggggttaacacatgggtgattcagctctctcacatggatcataagcatggggttattaggacatttatttttgctaatcacctaagtgatatgactcctccctgaaccctgtcagaaggaaagattgtgacttattactgaaaccagaacttaggtgatgcgactcttctgtctagcaaccacgtattttgggtattgggacatttcacatgtccaaacacctagaagaatgggagactttggcctcgtcctgtccacagggtttcttgtgacacatatctgtatccattacataaaagatgtgatgccttttctatctgcaccctgcccacaggaaagattgtgacatacttcaggccccagccaccaagtgatgtgtctcttctgaatgtgcataactttcaggagaaaattgtaacacgtcactggttgagaacccagatgatgtgactctcctgccttgtcacagtcctcagggaaaagaaattacatatcagtggcccagcatccaggtgacgtcgctctcctgcgtgatttctgccaagaagttcgttggtaacctacatctcagcccagctcacaggtctgatgataactaatacctcttaccggtcaatagaagagatactgtctctcacagctaggcttacaaaaaggagtaaaatcccaggtctcctctctgtatgaaggttatagagaattaccactctctcgtatattgtataaagcactcggatggtacagagcatgtcatcataggacccagcagacagatcatgtttcatgtaaacacaccctgccaatttttagaattgtcatcctcacacatggaaaagcccaccgatgaggccataattctcatgcacagatgcaggccacagttaaaactgtgactatcggccgggcgcggtggctcacacctgtaatcccagcactttgggaggctgaggtgggcggatcacaaggtcaggagatcgagaccatcctggctaacgtggtgaaaccccatctgtactaaaaatacaaaaaattagccaggcgaggtggtgggcgcctgtagtcccagccacttgggaggctgaggcaggagaatggcatgaacctgggggatggagtctgcagtgagctgagatcgtgccactgcactccagcctgggcaacagtgagactccgtctcaaacaaaacaaaacaaaacaaaaaacaaaactgactatcatttgtgaacatgtggccacatttgagatggtaactctataagatcatgggtccagagcagcacaacgttctcagagcaggttgcaactctcatgcacaccatatacagtcctcaagagagtgcccttacagggccaagcacacaggtgagattgtgaaacttatattcacacccagtcaatagcaaagattgtcatccacttaaatacagcctacttttgaggttctgaacctcacttttggagatagttgaattggaaaattgactctcatttgtggattttgtccacagttgggttagtgacttttttctttgagacagtctcgctctgtcacccaggctggagtgcagtggcatgatctcggctcactgcaacctccacctaccaggttcaagcgattctttcacctcagccttcagagtagctgggactaccggtgcatgccacaatgcctggctaatttttgcatttttactagagacagggtttcaccatgttggccagactggtctcgaactcctgacctcatgatctgcccacctcggcctcccaaagtgttgggattacaggtgtgaccgccatgcgtggcctcgggttagtgactctgtaaccaaaattcaacacacctttgtgactgtaacctcactaaggagaataatttatttatttattttgagatggagtttcgctcttcttacccagactagagtgcagtggtgtgatcttggctcactgcaacttctgcctcctgggttcaagtgattctcctgcctcagccttccgagtagctgggattacagatgcccaccaccacacaggctaattttttgtatttttagtagagatggggtttcaccatgttggtcaggctggtctcgaactcctgacctcaagtgatctgcccacctcggcctcccaaggtggtgggattacaggtgtaagccaccatgcccagcctaaggcacataatttgcaaaggaaattgaggctctcatgcacaaatccagtccaccattgagactgtaacccctgtacttagacccaacatacaggaggtgttgattctcatcccttgactcaggacatgtgtgtaattgttaatgtcatcacaagacctttctacaaatgtcttgtgacatacaccttggcccagcatctgagttatttgtctctttttcctgggcccagttcacagtgctgtatcactggacccagacccttggtaatgtgattctattctgccttgatacagcccacaagggtcattgtgacatatcacagggtgttgcacccaggtggtttgagtctcctcttctgccttggtgctacccacaggtgtattgtgacatattgctgggtctgtgttatgagaatcttttgcttttgccctaaacatataggccattgtaacattgctgagtccaacacccaggtgatgtaacgcttcatcctggacctgtctacagaggggattgtactgtatgtcttcaccaatcaccctggaaatgtgatttacttttcctgcctgttccctaatcacagggggtattgggacatactattgggtccagcacctagctgatgtgacatttttgtttttttaaggttctgcttagaaaagagattatgacatatgactgtccctaacactaaggtgatgtaacttcttttgttttggctctgcccttagaaggcattgagacatactgctgggcctagcactaagatgatgtgagtcctctgcctgaatcctgactacagggagcattgtgacatatttcttcacccattacaatctctcctatagaccaagctcaggtaaatgccctttatacctacgtgatgtgacattcctcttctgccggggccatgcccacagaatagagagtgacttattgctggggcaagcaaaacagtgatgtaattattttgcctggtccctgcacacaggagtcactgtgatatatgtttgggcctcccacctagataatgtgactcttttcttctggggtttgtccacagtgggaattgtgatatgccacgtgacatagctcctgtgtgatgtgactcctcttcattcttgacttcttccaactgggttgattggaatataaagctgagcccagcacctaggctatgtctctcctcttgtctatgagccctacccacaagagacattgtgacatgtctctaggcttctcacctaggtaatgtgacttgtttgcctaggccatcccctcaggggtattgtgaaatactgctggaccaagaacctaggtgatgtgactctctgctactgcttggggtgtgcttaaggggaaattgtgatgtgcatttaggtgcgtccatcacctacatggtgttactctcctctcctgcctgagatctgcatgcatcatgtatttcttttaattaattaattaattgttttgagatggagttttgctcttgttgcctaggttggagtgcaatggcaccatgtcagctcaccacaacctccacctctcaggttcaagcaattctcttggctcagccttctgagtagctggaattacaggcatgcaccaccactcccacctaattttgtatttttgatagagacggggcttctccatgttggtcaggctgttctcaaactcctgacctcaggtgatttgactgtcttagcctcccacagtgctgagcttataggcaggtgccaccacacctggctggaatcatttatttcaacatatctctgggtccaacaacatggtgatgcaactttcctgcatgggccctcccacagaaatactctaatacatcttttcattcattatcttggtgatgtgacttttctattctgcttgagcactgccaaaaaaaaaaaaaaaaagattgtgacagatttctggaccaagcacctaggtgatatgactttactcacttgcctgaaacctgcatattttggttattgtgacatatcactgaagcaaacacctaggggttggaaagtttctgcctgagcccttcccacagagagccttgggatgtatttttttaatccatcacctgggagatgaaaccctatacttctgcctgcattctgcccatagagaagattgtgacatattgctgggtcaagcaaccagctgttctgtctgtccttctggactttgcccacagtgagtcttgtgacatatatctgagcccagcatgcaggtgatcttactctttttcctgtgtcctgctttcaggagaggattgtaacatctctggttgagaaccctgtgatgtgactcttctgcctggtgcatgctctcggggaagattgtgacataaccctggcccagcacacagttgatgtgactcttgtgtttgttctctacccacaggtggaattgtgacatataacttgacaaagcacacagatgtaatgatgactctcatacctcaaagaagccagtaggagagataatgttgctcacagctacgcttaggaaaacaaagaatatcctggctcttctttctgtacaaatgtcatagagaattaccactctctcacatctgtaaagccctagtgtgttatagagaatgtcataacagggtccaccatgcagatgagattgcatttgtcctatgcacagcccaccaacctttagaattgtcaccctcacacatgggcagagcccactgggtgaggtcctgaatctcacatgaatgcactccacagttggaactttgactgtcatatgtgaacatctggccgcagttgagatggtgactcatttctaaacctagctcataggaaggtgaggactctattatctggactcagccaattagagagatgttgactctgggcttagaaccacagaaaaggttctggatttccttcttgtatgaaggtcacagaggatcaccactgttgcctattgtatgaagccctcaggtgacacagataatgtcgtaggagtacacagcacacaggtggatactgtctcttgcatgcacactcagacaacagtaaagactgtcattctcccacacaaacatatcccactgttgaggttctgaatctcaaatatggagtctgttgatagttgcagaattgagtctcatatatgggcctggtcaacaggtggactggtgactctgagaccaaatttcagcacacatatgaggctgtgactgcactgacggtctgcagaagaaattttggctctcttgcaaaaattctgtcagctattgagattgttactcatgtacttagacccaatatacaggaggtattgactcccatatctagaacgtggacacgtatggaatttctaatctcattcctggactttctttcagatgtgattgaatgtgtctgctaagcgttttagtgatttgacttttctgccttagcccagcccacagatgagattgtgacatatctcttgactctgcacctcaaaagaagtgactctttttccagccttggtgttgccctcaggtggcattgtgacatatggctgggctttccacttaggtgatgggaatctttttttcttgccttggtgctgtgcacaagttgcattgtgacatattgctaagatctgcactcaggttatgtgaatttgctttttttccctaagccctgaatattttgcaagttaggacatattactagccccaacacctataaaaagggaggcttctgcttgggccctttctacagggccttgtgacatatctctgcatcagtcacctaggagatgtgactctccatttttgcctacactctgcccacagaaaaattatcactaggcccaggtaccagacaatgtgtctttcttgcatggccttttaccatagaaagcattgttacctattgctgggctcagcacctaggtgatgtcattgctgcctgtcttgctttcaggagaaggttgtaacatattcctggctgagtattaaagtgatgtgacactcctgtctggtccctgccctcaggaaagattgtgatgtattcttggccaaaaacccaggtgatgttactctcctcctttctgcctgttcacaggtaggattgtaaaatatattttggtctagctcacaggtgcaatggtgactctcatacctcaaaccatctaataggagaggtgctgtcttttatagctaggcctagggtaatgattaagatcctcggtctccttttttgtacaaagtcataggaaattaccactttcttgtatactatacacatctcttgtggtacagtgagtgtcattccagggttcagcacacaggtgagattgtggttctcatgtgcacaccccaccaattgttagaattgtcaccataatacaatccacagttaaaattgtgactgtcatatgtgaacatccagccagagttggaatgatgatttatttctaaatccagtactttagcgggtgaaaattctatctggacccatgaaaaatttacctgggcttagggccagagtaaacacagtttacaggaggaatgaaggctctcatgtgccaatccagttcattggtgaaattgtcagtactgtacttagacccaacatagaaaatgtggtgattctcttacctagaactgggacctgtgcgggattgttaatttattactggaccttcctgcgggagtgattatcacatatgcctatgttcagcacctgagtgatatgattttgctgcctggtcccagtctgaagataagattgtgatttatcactggatccagcacctcggtgatttgactcttctttttttggggacccaacaaattttaagtattgtcaattttgggtgaatcctgcacccatgttatgtgactctcccaaatgtgccttacatgttgtgccatattggggctcaatatatcacattagacattgttacatattgctgggttaaacacccaggtgatgtaactttttttttctgggactgcgtgcaggggaccttgtgacataactcaatgtccatcaccatactgatgttactctcttctcctgcctggtctctgctcacagagaaattgtgacagattactggcctagcatctaggtgatgtgactctcctctttttttcaggctccgcatatttgggtattgtgacatattgctgaactcaacacctaagggatgagagtctcctacctgtgcccttcctataggggacattgtgacatgtctctgcattcctcacctaggagatgtgactctcatcttctgcttgcaccctgcctacatggaaagctgtggcatattgctgtggtcagcaaccagatgatgtgtttctcctgcctgggtcttaataaagacaggaaagatggttgacatattactgggcccagcatccaggtgatgtgggtctcatcttctgcctggtccctgcttacagagaaattgtagcatattgctacacccagcacctagcttatgtgactcttctcttcttttaggttttgccttcagatgacattgtgacatcgctgggccctgcattgacaatttgtgactcttctgcctgtgatttgcacacttgggccattgtgacatattactgggtgtgacactcaggggatgtaatttttatgcctgggccttgcctataggcggcattttgaaatgtctttgtggctgggtgtggtgactcatgcctgtaatcccagtactttgggaggctgagggaagtggatcacaaggtcaggagtacaagaccagcctgcttaatattgtgaaaccctgtctctactaaaaaaagaaaaatacgaaaagcagccagccatggtgactggtgcctgtagtcccagctactcaagaggctgaggcaggagaattggttgaattcgggaggtggaggttgcagtgagccaaaatcgtgccactgcactccagcctgggtgatagagtgagattccatctcaaaaaacaaaaacaaaacaaaaaaaagaatgaatgaatgtctttgcaccaatcccaaaggtgatgtgactctcttgtgttacctggtctctgctcacaggaagaatcgtgacctttcacagcatatggttgatttttttcttttatttcttactttttcctgcaggaaagatggtgaaatattaatgaactaagtaccaaagcgatattacttttttttcttggacctgcctacataatacgttgtgacatattgctgcgccctgcccatagatgatatgagttttctgcccatcaactattttatgtgactctcctcttttatcttcgttttgtccgtaggttagattgcaatatatctttgggcctgggtcatgctaacagaagcgacagtgatttattactgggcacagcccacagggttgtgatattcctgcttgactcctgcccaagtggtcattttgacatatctcttggccagtcgcctaaatgataggtctctccttatctttctgtacctgtccacagtaggaaatgtgacatatctctgggcccagcacctatgtgatgtgaccttcctgtcatgccaaggccttgcctactgtagtgattgtgccatatagctgggcccagctcctatgtatctgactctcattttcttcctgagccctatgaaaagatagcattataacatctttctgagcattttaccaaggtgatgtgacttttcttcctgggttgtcctctcagggcattgtgacatgttgctggatgcagcatttaggtgatgtgacttcctctactgcttggactctgaccaaaaagggattgtgatgtatcacttggcccagcacctatgtgatgggactcttttctcttgtctgggccctacaaacattttgcattgtgacatatagctgggtctgccacccagatgatgtgtcttctacgtaagccctgaccacaagagtattatgaaataccttttcattcatcacctaggtagtgatgtgactcttcgtcagcctctaccctgccataagggaattgtgatgtatcactggacccagcacctagatgatgtaactcgtattttgactggaccttgcatattttgcatattgttacatattattgggtctgacattacgggatgggaagctcctccctgggccctgcccacaggtggccttgtgacatgttttggatccatatcctatgaaatatgactgtcctcgcctacatgcttcatgcacaaagaaaagattgtaacatatcactgggatcagccaccaggtgtgtgtctcacctctcagggtgttgctcactgagagctttgtaacatatcactgggcccagcacccagaagatgtgacttgtggcctgtgctcatcttttcttttttttctttctttctttttttttttttgacagccaggttggagtgcagtgatgtgatcttggcttactgcaacctccgcctcttgggttctagtggttctcctgccttagcctcccaagtagctgggattacaggcatgcatcaccacactgggcttatttttgtatttttagtagaggtggggcttcaccatgctggccagtgtggtctcgaactcctgacctcagttgatccacttgccttggtctcccaaagggctgagataactggcatgagccactgcatccagtctgcctgccaccagcagccatcttatagaaatagattttaatgcatccctgaccaggtacctaggtgatgtgatatgactctcctgtctggttctttccttcaaaaaagattgtaacatctttagacaagccccaggtgatgtgactcttctgcttactctctactcactgatgtaattgtgacatatatcttgccccagcttgtagttgctatgatgattctcacaccttgaaccaggcaataaaagagttactctctctcctagctaggcttaggaaaacaagcacaatccttagtctcctctttttgccaaggtcctagagaattaccactctctcacatattgtataaagctctcgggtggcacagacagtgtcatcaaggaacaaaatcacagatgatattgtgttacttttttttttttttggagacagagtctcgctctgtcacccaggctggactgcagtggcacactctcggctaactgcagtctcagtctcctgagtagctgggactacaggcatgtaccaggaagccaaactattttttgtatttttagtacagatagggtttcactatgttgtccaggctggtctagaactcctgacctcaggtgatctgctggcctcaggcttggaaagtgctggtattacaggcatgagccactgcgcctgccccccagcttcttttttgtatgtatatatttatttattttttgagatgaagtattgctctgttgcccaggctggagtgcagtggcatgatctgggcccactgcaacctctacctcccgggttgaagcaattctctgtctcagtctcctgagtagctgggattacaggcgcccgccactgtgcccggctactttttgtatttttagtacagacggtgtttcaccacctttgtcaggctggcttggcacttctgacctcgtgatccacccgcctaggcttcccaaagtggtgggattacagacgtgagccgctggacccggcctgattttctcttgaacaataattttatgtattgttaatatacataaaatattttggttcacattttgaatacattgaaaaagaaagaaaaaagagaattttcccatgttctggggtgggcctggctcagttcagggaggaagtcctccctgaaaaggctgcaacttaggctgtctctcttgtgttaggctgatcacatcttctgtcactcagggccttgagaaggtggggtcttgaacgatatccagtcagcgacattggactggaaactgtccaatcacacacacaactggagcagacagagcgacttccaggttgtagttggggggactgtgtctctagctgcagatggagctccaggtgtcgtcttcactgctctgtgtcctctgacttagagtcccagcctgtgtggccctgtgacctgcaggtactggagatccacagcaaagacgccaggacccgctgaaagcctagaaatggtgagattgccagttccgacatctggagaggggcaagggctggttggaactggtgggaagcagctgtggtgggactcaggcctccccgcagtcagctccacaatctgcaccctgagttctccttgcccaggttggcatccgtcccctgcagccataagatggcagctaggctgacagccgggcccccgggcgtcctgtcttcccagtgcattggctgtgccatgtcctggagccctctctgggcagctctgcaccagtagcgccacatctctcccagattgtgcagggaccacgggagaatcatcagggcagaatcctgactcagggttattaaaaatgtatgggtgtcacaatgaaagtattaaataatttaatcaaagggtgattcaaaaattgtagagcacccagctatggttttaatttatggtctgtggaaggggcttctcgaactcctgacctcaggtgatccacccatctcggccccgtaagtgctgggattacaggcatgagtcactgcgccagccctagtttcttaatttttacacatcagggtggaaatatcttggttatgtaatcagagtttaattggcagtttatagttggttaagcctgaagcttgtttccggcaatgtagtaatttaccaaaaaatgctcttgagtttagattattttttagaagtacaaatccggggactagagccacctcagtctaattgcctgccacttaattattttcacactccaatggtgacggatttttccctgaatttttcacatgtgtgccaagcaggacctcaagtccacccctcatcccatattcctccagcctaactctggcttacagcaaaatactaaatttccagtttcgtctgatattcccaaatgccaatttcccctccctaattcactttatcaactatttgtccttgagtgtacatttttatattattttaatcttttcttttttttttttcttattgagatgaagggagacttgctctatctctgagactggagtgcagtggcatgatcttggctcactgcaacctccaccttctgggttcaagcaattatcctgcctcagtctcctgagtagctgagattataggtgcctgccaccacacctggctaatttttgggtttcaccatgtttgtcaggctggtctcgagctcctggcctcaggtgatccacccaccttggccttccaaaatgctgggattacaggcatgagccactgcgccctgccgactgattgtttactacatgatttttcatacaaataataaaataattgtctgaaaggaataaatgattttgcttttcttactgagatataaaatgtaagcaccttaaaagtttcttcccttatgtgaacactgtgtttgagtaatattgctgaatttttctaacacttagtttcacaaaccaagttaataactctgacatggaaattaaagcttaagcccagtgactccaagctgaggctaatattgagcctgcaaaaggaggttattaaggcccagttccttttggggaacctcccctgcaaatttcccaacctgattatccaagacatggaagaagcctctatactgagagaaactacagagccttggaatgctggggatccacaggcagatgcagataaggttaatataaaggagattgggagggtcttactgaagatggagttgttattgttttgaggcagtttctagacttttaaaaataaaacagatgtatataaaaaattgaatttcgaaggagtattgcaacaggagaaagtagcaactaagtttttttgtttttgtttttgtttttttttttgtgacagagtctagctctgtcacccaggcagcctcctgagtagctggaattacaggcgcgcaccaccaagcccggctaatttttgtatttttagtagagacgggctttcaccatgttgatcaggctagtctcagactcctgacctcgtgatctgcccgcctcggcctcccaaagtgctggaattacaggtgtgagccaccgcgccaggccaagagttttaaagattgcaaagattaggcagaaaagggctttgccttccagagaaaagcaaacaagattagaaaggaggttggaggggaatgtttaaattgagtgtaataaaatcagattttagattagagaatgttttacccggacgtcagtatgttcttaggagggacataaaatggggttgtatggtggctcagactgagggtaagctcaaagttcatatcctgtgggaagagaataaacctaagcttgattaagaagtattttatgttgactactgaagacaaagtcagcttgtttttcagtgagtaaaaagaaaaagtacaaagcgtttttctggctgtgtgataggtaagaaaacagcaccatttcagtcataatggaaagaggtggctttcttttttttttttttttttttcccttaaagtcttcctggagaacacaaaggatgagaattttattgatcacagctgtttctcacctttgtgcttcatcttttcccaccttttttcttggttcaatacatttatttcacttttttggggttatatctttttttttttttgagactgagttttgctcttgttttatttgtattttattgtattgtatttgtattttattttctttgtattttatattatgttatgtattttgtttggagacagggtctcagtctgttgcctaggctgaagtgcagtggcatgatcttggctcactgcagcctcaaccttccaggctcaagcaatcttctttttttttttcttttgagacagtctcacttttgttgcccagactggagtgcaatggcgtgattttggttcagtgcaacttcctcctccggagctcaggtgattcttctgtctcagcttcctgaatagctgctattacaggtgcccaccaccatcatgcccagctaatttttgtatttttagtagggacaggatttcaccatgttggccaggatggtcttgaattcctgacgtggtgatctgcctgcctcggcctcccaaagtgctggggttacaggtgtgagccatcccgccaggccaagcaatcctcttgtacctcagacttccaagtagctgggactacaggcatgcaccactaaacctagctaatttttcttttcgtatttttttagagatgggatttttccatattgctcagggtggtcttaaactcctgagctcaggcaatccacctgccttggcctctcaaagtgctgggattacaggcatgagccattgtgcctgatcataccgtattttctttattcagtctaccattgataggcattcaagttgattccatgtctttgttattgtgactagtgctgcagtgaacacgcttgtgcatgcatctttatgatagaataatttgtatttctttgggtatatacccaattatgaggttgcttggtgaaatggtaattctgtttttagttctgtgaggaattaccacactgctttttacaatggttgaattaatgtacactctttaacagcagtgtataagtattcccttttctctgcaaccctgacagcatctattttttaactttttaatagcccttctcactgatgtgagatggcatcttgtggtttttctttgcatttctctaatgattattgatgagcattttattacatgcttgttagccacgtttgtcttcttttgaaaagcatctttttcatgttttttgtctacttgttagtgaggtcttttttttcttgtaaacttgtttaagtttgttatagattctggatattacacctttgtcagaagcatagtttgcaaatatttcctattattctgtggttgtctgtttactgtgttgatagtttcctttgctgtgaagaagctctttagtttaattaggtccaatttgtcaatttttgcttttgttgcaatggcttttggtatcttcatcatgaaatctctgccagtttctatgtctagaatggtatttcctaaattatcttccagggtcttttataattttcaaataaatatttcagcctttaattaatgttgagttgatttttgtatatggtgtaataaagtttcagtcttctacatactgctagctagttattccaccaccatttattaaatagggaattctttccacatttctattgtcatctttgttgaagatcagatggtagtaggtatgtggcattatttctgggctccctattctgttgcattggtctatgagtttgtttctgtaccagttccatgttgctttgtttactgtagctctgtagtataatttgaagttaggtaatctaatgccttcagctttgttgtttttgcttatgattaccttggctattcggactcttttggttttatatgaattttacaatagttttttttttttttttagttaaagatattttggtcatctgattagaatagcattaaatctgtaaatattggggttagtatgaccatttttaggatattgatattttctacttatgagtgtaaagttgttttccatttgtttgtgccatttcttacttctttaagcgttgttttgtaattcttatcatagagatctttcaccttcctgattagctgtattcctagatattttgttctttttgcagcaattgttaatggtattgtgtttataatttgtatttggcatggatgttgctgatttacagggatgatactaatttttgtacatttattttgtatccttaatgatactgaagttgtctgtaagtttaaagagtttttccaccaagactatacagttttccagacatagagttatgttgtctgcaaaaagggatagcttgacttcctctctgtttaagttcctttttttgttgtcttttgcctgattgctctgaccaggacttcctattttatgttgaatagaagtgttgagagaaggcatctttgccttgtgccaatttttgaggatgaatgcttcaagcttgtttttttcctttatttttgagatagagtctccctttgtctcccaggctggattgcagtggcacaatcttggctcactgcagactctgccttctggtttatgcaattctctttccacagcctgtaaagtaattgggattacaggcacccctggctaatttttgcatttttagtagagatgggattttgccatgtcagccaggttgatctcaaactcctgacctcgggtgatccgcctgccttggcctcccaaagtgctggaattacaggcatgagccactgcacccatctgcttccaggttttgtccattcagtatgttggctgagagtttgtcataaataacttattattgtaaagtatgtacttttaatgcctaggtttttgagtttttaacataaaagatgttatattttatcaaaagccttttcagcatctattgaggtaatcttgtggtttctgtctttagttctgtttatgtgatgaatcacatttattgatttgatttgtgtatgttgaaccaaccttgcattcccaaaataaattctacttgatcatcgtgggttagcttttttgatatgctgctaaatttggtttgtcagtattttgttgaggatttttgcatgaatgttgaaagatattggcctgatttttttttttttaatctcagccaggtttcagtatcagaataatgctgttcttatataataagttggagaaaagttactttttcttaatttcttaaaatagtttcagtagaaataataccagcacttttttgtacacagctgtgaatctgtctggtccttggctttatttggttggttggctctttattactaattcaatttttgagcttcttactcatctatttagggctttgatttcttttttgttcattcttggaaggatgtatttgttcaataatattttcattttttttagattttcttgtttgtgtgcacagaggtattaatagtagacttaaatatatttttgtggggtcaatagtaatgtctcctgttatttctaattgtgtttatttggatcatcccttcttccttcattaatctagctagtggtttatttatcttattttttttttcatagacttaattcctggatttcttgatactgattttggttatttcttgtctgctgctagcttagggattgatttgctcttgcttctttcattcttttatttatgatgtcaggttgtcaaatgaagatctttcaaacttttttagcattaaatgctataaatttcccttttaacactactttagcagtattgcagatattctgatgtgttggttttttatttttatttatatttatttatttatttattttgagatggattttcgctcttgctgcccaggccaagtgcaatggcacgatctcaactcactgcaaccactgccttccaggttcaagcgactctctggcctcagcctcccaagtagctaggattataggcatgtgccaccatgatgggctaatttttgtatttttagtagagatggggtttcaccatcttggccaggctggtctcaaactcctgacctcatgatctgcctgcctcggcctcccaaagtgctgggattacaggcatgagccaccatgcccagccctggcctgtttttttgttcttatttgtttaaaagaacttcttggtttttgccttaatttcattatttatcaagaagttattcaagtgccggttgtttaatttttatgtaattgtatggtttcaagttgttttctttttgttgaattatatttttgtcaagctgaagagttctgtagatgtctattaggactatttggtcaagtgttgagtttaggttctaatgttttgttaattttcttcttcagttatctgtctattagtgcctgtgggatgttgtagtctcccactattgttgtgtcagaatctaaatctcttcataggtctctaagaacttgctttattcatatgaacccatgaattttatataacacctttctcttttctgctttttcttccgtaaacattctttcctgtgtgcacaatgtgcaaaatgtagatgtccatgagttcaagaacatgtttagagacctagctgttgtaaaagaaaatataaattagaaataagaggcttaattagtccacataaaaataagagaaaatatcttactaaaatctcttttcttaaaacacttagattatgtgtagatttttatctcctttttttgaaatatatgtaaatcattaacagctaaataaatctttgttatgtatttattttttttttactcacgattgtctttatctgggacctgagattaattgctttgtttctgctttggcaaaaggttattcttattatttttagtcttttaaagttgacacagatttgttcacagtaaaactcattccaagagcacacaaaagtttagcataaaaataggattaaatttagcaaaacagaattataaggactaaaagatattggtaatttgattgacagaaacctgtttatccaacatgattatttacaggctgaagtacttacactacaaaagcaaaaatagtacagtttataaactgaacagtggagtatattgtcataccttggtttctatttattacttcagtacaattagcatagttatgtgtggtgttgttagacaacctgcattcatatacatttaatagtattttctacaatagtatgaatataaagccacaatgtctactttgaatgaattccttaattcttttattattgtgattcatacttttgaaatgtaaagtttttcaattgaaatacagttacagaaattttttaaaaaatcctacatacattatgactagtatgttaaaattattcctacttacatatttatatctaatatccaaagaaattttactaccacattgttacagtagatattagtctgctatgcttattaatttaaccaatagagataattataagtaagcataatttcaatgtctttcatttcacaaattggaatgctgctattgtaggacaaataaagacagatgatgtggccacccaaaaactgtagtagctctccagttagctaccttgcaggttcatgtatattccactatattaacacagtcagattttaattttttatcaaagtgctggtggaagttgtcagatatatttgaatatagattctgcattcaaaggctagaaaattagagagcagcagagatagaaaaaatattttatgattctgctgataatatacctcttttcttcataatactcatgtttctcatgctgagagtagctatgcactttgggtatttagagagaaattgtttttgcaggaatattttctggctgacttgatcaatcttatatctaatttcagttttttcttaagatgcttttaacttcttttttttctctcaatataatctttctcagagtgagagctgtttttctgtagaatgctttgtgtatctgttttagaagccctattagtatcccataatgtctgtgaaagacgtggctgtcacagtgagaactcttggagctatctctatctggatgcatgctggaaatctagcagtatattttccatgtcaccattataaatagaaactgtggcttaaataatgctctcatttccgttattgtgaaggtgcagttctacccagggaggctctcttcctgcagctcaggcttcactctttgatgtgacactaaagtgctgctatggcaattggcgttcacctatgatgtgagctgccagctgtgagccctgtgctgtggtccataccgcagtggcagatggtaggaaacaaaagaggacactggccaccagaagaggggaagccggagtactgtaaccccgtcctcagggaggagagaggtactgctttaaaatgcaagtagccaaaaagatagcaccctattcaaccacttttgtagaagagtgaaagtctgccttcagcaggcagctggcttcaagttgcagaactatcttgtcaggaagatgtgaaaaggttattttgtcattgaatataaccaattagcatatatggatgacctccccaatgtccaggtgaatttaggatgaactatgtatgacatggtgctgtgaattcttctacttgtgaactatttatggtaaccatctttatgtcttttcgatctcttaagcagactgactgtaatacatttgacattcagatttaattgtgtaatgaaagagttttctttttctttttttttttttttttttgagacagagtctcgctgtatttcccaggctggagtgcagtggtgtgatctcagctctttgcaacctctgcctgtcaggttcaagtgattctcctgcctcagcctcccaagtagctgggattacaggcacatgccactatgcccgtcttttttattttattttatttttttttattttagtagagatggggtttcaccgtgttagccaggatggtctctatctcctgatttcatgatcgacccgccttggcctcccaaagctgggattactggtgtaagccagcatgcccaacctctttcttttctattattgtggtttctctggggctgaagagaatttttttaaaattatatttcctagaattaccggacataatataaacaaataaggtgccaaccaagctttactctagaggggactttccctctcaggcttctagccaactcacagttatgctgtaaagtgcatactgtcacctaaatatgcaggcagaattgtgtctctgcctatttggtatctatagtcctccacagtcacttctagaggggctagagcagatttctacaaactttttttttttttcttagatggaatttcactcttgttgcccaggctggagtacagtggcacaatctcagctcactgcagcctccacctcctgggtttaagtgattctcctgcctcagtgtcccgagtagctgggattacaggcatgcaccaccaagcctggctaattttgtattttcagtagagacagggtttttccatattggtcaggctggtcttgaactcctgacctcaggtgatccacccaccttagcccccaaagtgctgggattacaggtgtgaggcacctcacctggcctagatttctacaaacttaatagggcagatattaaccattttacttctttcaatgactcttgtatcttcagacctgaaactgattcagagaccatggagcccagaaacccaatcagtgtaacaagtgtgcattgagtagacatggagacatgagaatctccacttctctttttctcctcttgctaaaatgctcacaattgcaggtaacacctgctgctactccacccatccaggacctaaatctgcagctccaaattctaaatctaggtctagaaattaaaaaacaaaacaaaacaaaagtttcatttgagaaatgcaagtctttttttttttaggggagggttgggggggatggagtcttgctctgtcaccaggctggagtgcagtggcgtgatctcggctcactgcaacctcttcctcccaggtcaagctattctcctgcctcagcctcccgagtagcttggattacaggcatgtgccatcacacctggctaattttgtattacttttttcagcagacatgggcttcaccatgttggccagtatggtctcgatctcttgacttcgtgatccacttgcgtcggcctcccaaaatgttgggattacaggcgtgagccactgtggctgtctgccagtctttttacttataaaactcagacattaaaataagagcacaattatgtctttctccctactttcaactatatattgatctcttgaagctgttcactattgccaaaagtaggtataagttaaaccaataataagttatttatttaaacaaataagaatttctcacaaactagtttgtatcaccccactctctatctctcttctttttttcccttcacaaatccacttgtaattgctgctaatcagtatagattccaggcatcttgaatatttcttctcaagttacaatgcttaagcttggccccaataaactgtgtacttatattcatgttgtgtcagcttttttttaggtaaaatattatttagaattttctagagcagtctctgtgagtagatttctcctttgattgtactcgctgtaacagccaaaaatgcaaagtgatgttgattttatctagaatctgcacataaggtctggtctctgcctggaatttacaagacagggccagactttagattgagaatgtacagaaaaccaacaggaggcattttctgcattgtgagatgtccacatagacacttcagatccctcctttgagagtgtgactctttgaccttttcacattgctacctttctgtgagaggctacaggtttaaatagaatctgatggcagaatctctaagtgtaaacaagcatcttaggagtgagagatcaaggccacaaagtagccagagccctgagcacaactatagctacctggaaaatgtgatactagagtgttattgtccaaaagctagctaatcaggacaggagatccaggttctggagctccaccaggatagtttcattttctttttagaatcagcctgagtctctcctgctggcttattattggtccatcagcccagggtcactggaaatgctctcacaatcacccaggcatctgagacatttgagaatctccagaacaattgtgtcaggctgacaagagtggttaattttgcttctgtcttactgtaaaagaaatgaatcatctggtgtgtgttcctcccatcatacaagagatgtctttggttggtacccagatgagagtttctctggttccctggtacttgagtgaaaaacaaggaggaggtctggagactcaaacagataaattgattccatttcatatagtcattagaaaaatagatgaagcagtcatggtccctaccatgcaagaacttttagtcttgactatcaactggataaatgatttaattatgcatcatatggtgggtacaataaatagacatgtgcaaaaatatgggatatatttgcaccattttctttatattgttaagacttctgatgtctacacctgaacatatatttataaacaagagttattatttgcattttttagcttgctaagaacacttatttatcttctaaaaaactattttagaaaaccttaagagatttgttaaattgcttattagtatgtgatataaccttgagaggggagtggggtttaaaaagattaaaaattatacaaactctgagatttaattttttttttttttggtacacttaaaaaatgaaacagaactgaaaatactccccagtggcacaaaaaacagaattttacattagctctacaccctgtcccaaccctgatcagattcaccctttttgaagaccttatttaggtgtggccatactctggagtcttgtctcacagaactaactagaagagatcagagttttgggtgatgcatcctgttgcttttttagggttggtgctcatgattttctgaaacccaaaagcagataaatggaaaatataaaatatgatttatagggtcttaattaaaaaaattttttttaaaaccattgtttgcagagacattacatttagcaacttgttttctctccctgcagatatagttgttgattcacaaatcacaaaatagtaaatataaacacaacaaaaattcatctaaattatatgaaactctatctgtatccctctcatctgtctatatttatattctatacattttttaaaaaaaatcagtgacagccgggcgcggtggctcacgcctgtaatcccagcactttgggaggccgaggcgggcggatcacgaggtcaggagatcgagaccatcctggctaacacggtgaaaccccgtctctactaaaaatacaaaaaaattagccgggcgtggtggcgggcgcctgtagtcccagctactcgggaggctgaggcaggagaatggcgtgaacccgggaggcggagcttgcagtgagccgagatcgcgccactgcactccagcctgggcaacagagcgagactccgtctcaaaaaaaaaaaaaaaaaaaaaaaaaaaaaaatcagtgacagataaacagaagaagaaataaaaatgctgggttcttattctaaatccttggaattattgaacacagtataaactcacagggttttatcagaattaaataatgggtcatcacagtgctctgtaacgtcttattgagaacacagtacctgcttaataaacattgcattagtacatgtgtacatgttgttttctaaatgcagacttactcagaaattgctgctttctgttttctctgtaaactttaaagagccaggaaataatatgatactttaagataaagaatggttgtcttcatttgtatcaaaagtatttgtgttgtgacaagactgctgaatataagggactctgtcctgtgcctcatttttctttttcttttttttctttttggagacgagtcttgctctgtcgcccaggctggagtgcggtggcgccatttcggctcactgcaagctccgcctcctgggttcacggcattctcctgcctcagcctcctgagtagctgggactacaggcaaccgccaccacacccggctaatttttgtatttttagtagagatggggtttcaccgtgttagccaggatggtctcgatctcctgacctcgtgatccacctgtctcggcctcccaaagtgctgtgattacaggcgtgagccaccgcgtccggcctgtgcctcatttttctaaacagtgctaataatgagcccagagagagcgacatcagcactgacaggggacttctttaaaacacccatttatggaccctttccaaacccacagaatcgtattacatagagtggggccaaatttacgaagtgatttataagctcattaaagcttgagtagcaatgcttaggtaagtggttataagcccagacttctaattagaatcacatggccaatttgcagaactctcttgtgcccttttcacagtttgcttaatgttctgggtgaaagcatctatttgttttaattaagtgtctcatgtgactctaatttgccagaatcaagtatgacgagttcaagatacatttatgagagttaagtgccgcctttgcactaaagaggggtccaggaacctgttctgtttgggtttgttaaggacaggacagtgtggccaatatttctattactgtagcagaaattgctagtgtctgtagcagaggagagaacctgaggaccaaaaaaataaaaagcacacacacacacacacacacacacacacacacacacacacactttttttctttttttttaagatggagtttcactcttgttgcccaggctggagtgcaatggtgcaatctcggctcactgcaacctccacctcccgcgttcaagcgattctcctcccccagcctcctgagtagctgggattacaggcatgtgccaccacgccctgctaattttctatttttagtagagatggggtttcttcatgttggtcaggctggtctcgaactccctacctcaagtgatccacccacctcagcctcccaaagtgcaggattacaggcatgagccaccttgcccagctgcagagaaacttatagttcctaaatcatttctgttataaaggacagaaatgggtagagtttttctgtcttgggctttctgcctttaggtgtggtggtaagagatgaacatgtggtgctcaaagtttttaaggcatattctcaagatgcaggtataattagtccagaaaatgtcatctgagaaataattctagaggaggaggagaaagagaaaaaatgactttttttcagctaaacatttctgacatcaagagctgtgtccgctgtgcctcctggattgccatgtgcttagtatgtgcaaatctttacttctaaacttgtgttttttctccctaatgagtttttcttaactacttttataaatgcttgtgatagtcaagggtctctgaaaaatatttcgtttctatatatcacagacttctctacatcacgacttcttatatgccgtgcagaattctcaccatgaattcgtgatctgcaatattaaaaatgttgtctttggctgttgaacatggataggtgtggattatctatctgtctgtctatctatctatctatctatctatctatctatccttctttctttctttttttttttttttgagacggaacctcactctgtcgtccccgctggagtgaagtggcatgatctcggctcactgcagcctccacatcccgggttcaagcaattctcctgcctcagcttcctgagtagctgggattacaagcatgcatcatcacactcagctaatttttgtatttttagtagagacggggttttaccatgttggtcaggctggtctcaaactcctgaccacatgatccacccgcctcagcctcccaaagtgctgggattataggcatgagccacagcatccagcaatgatactctagatttctatggggaaaacctgggattcttagtaaagatggagaacatgtaatgttgaggttccttctgtgttcttaatggcattacaccattaagaaaatgctcatttaaacagaatggcatttattacccaaaaagttctgagaaaagtggctgggtgatgtggcttatgcctgtaatcccaaaactttgggagactgaggtggatggatcatgaagacaggagattgagaccatcctggctaccacggtgaaaccccatccctacaaaaaatacaaaaaattagccaggcatggtggcacgtgctagtagtcccagctactagggaagctgaggcaggaaaatcacttgaaccttgaaggcagaggttgcagtgagccaagatcgcaccattgcactccaacctgggtgacagagcgagactgagtctcaaaaaaaaaaaaaaaaaaaaaaaattaccaggagatacctgcttatttgggtgctaaagagagactacttaaagtcactattaaaaattgtagaacatggaaaatatctctatcttggactttccatataaccgatgttttcttatggttaaattgagactgtaatttactttagtggggggccatatctcagtagtgatgctgtgtccttctgggtgcatcagcacactatgaaaacttgttcgagtgcatttgatgttaataactcacttgcttaataaactctcttacagatttttgcactatagaggttttttttcctcttcatcattaagtatctttatgcagctgatgtccatacaccatcacatttaatctggcagctgccctgtttttgaggttttctttgtatttatctttctttggtaaatgaaagctctcatctttgtttacaggccagaaaaactgaaaaagacacaggctcttccacttactggatgtttgacaaaatgatattttggggccaaaacattggcattactggtaaacttggtagagattcagtaactcagactttatttcagatctcctgaaaaaataatctgcattaacatgatgtccagtttattgtacacattaaaatttgagtggtaccttctaagtcaacatgtctattttgtctgaaaaatgtaaagaactatgtctttttcatctgaaaaacatatataactcattctgtattatgtaaatatagtactcaaaaatgtgcatgttagtgtctatgccctcaattttatactttatcatccagacaagtatcatatatacactgatgttgtggatattatgccactctcttttctcagagttagagaatacattagaaaaggtttgtgtgttgacaattattttattggataatttcagtcactcttataagtcagaaccagttttttttactctctcattttgccttgagtcaaatggaaaattctgccaatggccactttgtacatatgtgtgtttgtgtgtcttttccagggactcttgacgtttaggtatgtggccatagaattctctctggaggagtagcagtgcctggacactgcacagcagaatttatagaggaatgttatgaaaacctggccttcctgggtgaggataactttaatacaaaattccttatataaactaaaggtttcatttctcttttgtagaatgttttctggtaatttatgctttcaaatttctgttttcaagaaaatcctggggatttgtctgtttagaaaagaatttcttcaagatatttcatcttgacctgaactttccacattcctgagcggatctgtgtccttcactttagattattggtaatttcagaagtttagttgcataaaatattgttactcacaccttaaaatctaattatcatcaccagtttttgattcagtagtaccaggcagtgaaattaagaacctacaaaattaattttttttttttttggagatggagtcttgctctgtcacccaggctagagtacagtggcatgatctcggctcactgcaacttccgcctcccaggttcaagcgattctgcctcagcctactaagtagctgggattacaggcacccgccaccatgcccagctaatttttgtatttttagtagagacagggtttcaccatcttgggcaggctggtctcaaactcccgacctcgtgatcccagcctcccaaattgctgagattacaggcgtgagccactgcgcctgaccaataaaagtattttctaaatagttaaacatttctgttataaattagtatattgggataaatttattagaatattctattatatcctctttactgaacacattactaagttggtaattggagaatatgagcaagattcatgttagttatttttaataaaacaggtattactgtctctaagccagacctgatcacctatctggagcgagaaaaagagccctggaatatgaagtgacatgagatggtggatgaacccccaggtaggttagagtgaatacaacagacaacatggatgagaggcccaaatcaagaagaaagcaagtctttaaagtgatttgggaagctgtgttcaaaaggaaatagtttctggaaagcctgaaatttttaaaaattatactctcacgtaggggcatcttatgtcttatgtttataaaatttctaagaattctaatttcccttcagtgttcttccttcaaatttacagtgacagctaaagtactattcatgacatacaaaaagagtgcacaatctgacttttttcttgtttttgtggacagagagatatctccataattttgagatactctatgttaaactattttttaagttctctttttacatcacgtctgaaatgcacgagagtgacggtttctgtttcactggttttcttgttcattttttctgcacatttcatcctgttttcattaccatagttttgaaatatagtttgaaattataaagtatgatgtccttctgctttgttcttttttcttaagattgctttggctattcaaagtttattgtagtttcatctatgttttagggttgtgtttttcattactgtgaaaaaaaaacactggaattttgacagggagtttattgaatctagagatcactttggataatatggcagtttcacaatacttattctttcagtagaaataaaatatttttaaatttatttgtgtcctctaatttttttcattgatatatctttcacttaaaagatttacaagctccttgtttaaatttgttctaaaattaattatttcattgctattgtaaataagattttttttctctcttttatcagaccgtttgttttaagtgtatggaaccataacttatacttgtatgttaattttatatttttagtttaaacaagttttaatgtactgtttatgttttttttttatatataagattacatggtctaccaacagcaatgttttacttttggtcttcaatttcaatgactttaaatttttcttttgactatttcttcatccacatactttcagtgctatgttaaaatagaagcattgacaataagaaacaattgttttgcaatggggtctgtaaatttaaaggagcaaacacctcttcaagattttataaactggtttcagagagcaaaaataaatttttgtttggcccccccaatgtgatagaatgccctctgggtttgtggtgaagaagggttgtagcttggtcttaaggctgctgggtttgcacaagggttcacctttagttgtcttgttaaaaggggcttggataggctgggtgcggtggctcatgcctgtaatcccagcactgtgggaggccgaggcgggtggatcacgaggtcaggagatcaagaccatcctggctaactcggtgaaaccccgtctctactaaaaatacaaaaaaattagccgggcgtggtggcaggcgcctgtagtcccagctactcgggaggctgaggcaggagaatggcgtgaacctgggaggcagagcttgcagtgaaccgagatcgtgccactgcactccagcctgggtgacagagcgagactccctctccaaaaaaaaaaaaaaaaaaaaaaaaaagggaaaagggcttggatagttgtagttttcattttcatttaatttttggacagagtgaatatctttcaggactttgctgtgtattgcagacccaggggcaggtttctgcagtcgggtctgcatatggtgttctttatatcaggatgtgatgagagtggctttcactgagtacaagagagaattttcccaggtcactttgggtttctacataggcagaaccggccatgaactgtggctcagggagctggaaatgagtcatggaactgcctcagggaccacagtaaaggccaaggtctgcaggcctctcagcatagctataaatgggtgtcttcctctaggcctctggaagagcaggacctcccccagactgtgactgggaagagtttgggatggttacagagtaagttcagaattctcactggaaccaagttaggtggaacgttttcttgtctgtagccaacaacagtagtcctgtagtttgccacctgaatgagggcctgccttctaaacagaattatcttcaatattgggctttagcagagtttcacaactcccttcctggatctcagaactctcttaaaggcacttttttttttttttttttgagacggagtcttgctctgtcacacagactggagtgcagtggcgaatgcagtggcacgatcttgactcactgcaacctccggctcccaggttcaagtgattctcctgcctcagcctcccgagtagctgggattacaggtgcccgccaccacccagctaaattttgtgtttttagtagagattgggtttcaccaggttggctaggctggtcttgaacttttgacctcaggtgatccacccacctcagactcccaaattgttgggattacaggtgtaagccaatgtgcctggccaaaggcacttatttttgagatggggtcttgttacataacccaggcaagttttagtattttgactgtaagcaattctttaatgtatcatgtagctgtcattactggtgtaaaccatgatgcgtgattctcttaaaaaggcattttcatcaggaatgactgacaaattttcttgctgtcaggggataagcaaataggatgccttttttttttttatcttgttaatgtcactctccatataaatttttactttattttctactttaaatttgtctgcaattttagattcagacatttagggcaatatactagaatttacgtgttgtgcctgaattaaattaggtaattagtatgcaggcaggcaaaaaggaattataaaattttcaaccacttttgtcagcctatatctaaataataacatagtttatttcccaaatatttgttttatatatgaggctctaaccatattctgctaaatatatgtataatttagcaatgtaaggtattatttgcttctatatttggattagttttattttgttcaaaaatagcaaacatttaaaacaaaaaattgtcagtagtttcttttaaaagcttatccattaaaggtttctcattagcatctcctgtttatgattgtatttccttttctctgaaattttattgccatacaatagatatcagtaatttaaaatgcctgccttccgggaatgcacagttacagtcaaacattgcagttatctagacaaattatttgttaatgtacattgatgttgccaactagattttatgagtaaacatttattattgtcttgtagttctatattgtggttttttactataaatttcttaatatcagtttattgtgtttttggttttacttatgtattataattttagataattggcaattctgtttgtatactttaagttaatgtggggtttaattaaaagataaatgggccatatgtctatcacaatcagatatgtgtgtgtttatatctgcaaatgtgaccccaatttttgttgtagcttatcttgtatatattctttcttagctcattctctttttctctttttttttttttgtttatgtttttgagacggggttttgctcttgttgctgaggctggagtgtaatgcagtatctcggctcactgcaacctctgcctccagggttcaagcaattctcctgcctcagcctcccaagtagctgggattacaggcatgtgccaccaggcctggcaaattttgtatttttctttattagagacggggtttctccatgttggttaggctggtctcggattcctgacctcaggtgatctgcccacctcagcatctcaaagtgctgggattgcaggcattagccactgggcccgacctcttagctcattttcaatgttggttttatcttgtctaagtgagtagccttggaaatagtctcattttcgtcatgtgtttaatgatgaatatgtatttcctttgtgtgagacaaacactttgtgatttggaggtaatttttaaaaagatttataatttggtatttttttcagttttttaaaaagtaactgtaaaaacatgtaacatgtaatttagtttcttaaatctatttaaatatacatgtcacagccaggcatagtggtggctcacatctgtaaaaccaggattttgagaggccaggacagaaggattgcttgagcccaaaagattgagaccagcctgggcaaaatgtggagacaccctctctacaaacattttttttctaagaaatagccaggcagggttgtgtgtacctgtggtctcagctacttgagagaatgaggggcagggttacttgagcctgggactgtgaggctgcagtgagccataattgtgccacgcactcaagcttgggtgacagattgagaccctgtctcaaaaaaaaaaaaaaaaagttgtgtatttcaggtatgttaactatattcacattgttatgcaaaagacttctagaaattttatatcttgtaaaactaagactcaatatccattaaataacatttactcattttatgctctctccatcccttaacaaacacccttccactttctgtttttatgagtgtgactattttatatatcttacgtaagtgaaatcataatatctatgattttactactggctgatttcagttgacataatattttcaaagtgtatctttaaatgtgtcaagatttttaagattttttttaaggctgaataatattccattgtatcaaatatgtcttgaaggtcctatattgcatattttagatatagattaataaatggaattgctgtatttgataataattttatttttaattataagaagtacatttataacataaaataatggatgcctgcttgttttctactgacaatcaacacgggtttcttttttttttgagacagagtctcactctgttgcccaggctggagtgcagtggcatgatctcagctcactgcaacctctgcctcccaggttcaagcgattctcctgcctcagcctcctgagtagctgggattacaggcacgtgccaccacacccggctaatttttgtatttttagtagagatggggtttcaccatgttagtcaatctggtctggaactcctgaccttgtgatctgctcacctcggcctcccaacatgctgggattacaggcgtgagccaccgtgccagccagtccaacatgatgaaaccccatctctactaaaaatataaaaattggccaggcattgtggcaggcgcctgtaatcccagcttcttgggaagatgaggcaggagaattggttgaacctggaaggcggaggttgcagcaagctgagaccatgccactgcattccagcctgggcaacagagcaagactccatttcaaaataaaaaaaaaaaaaagaagttatcttctatgtctaattaaaagatttttcacttatagtttcaggaaataatcgaacttaattttatcagtattgatattcagtatggataattcagtatggatattcagttttaaaattatcttttttctattgtgtgctcatgtcaattttgtgggagattatttggccatattcagaagggttatttctgggctctctgttctttcatctgtttatctgtctttttgtcagtaccacattgtgtttgttattgctgcttttaatatgtttcaaaatcagaaattataatgcacctttgttctttttcatgggtgtttggctagaggtcataataaaattttaacattttaaacaatatttctttaaaaaactgctgttgggatttttatgaagattatattgaatttgtctaccactgtaagttgtattgacatctttgaaaaactattattttttgattcctgagcaaacatatgttgaagagtgtgttttattttcttatatttttggattttttttagttttaatttatagcttaattcagttttggtcagaaaacacagtgtataattttggtcttcttaaatatatttgttgttgttgttgtgtttgttgtttttgtttggagacaggatcttactctgtcaaccaggctggagtgtactgccatgattttgcctcactgcagcctcaacctaccaggttcaagtgatctttcctcctcagtgtctcatgtagttgggactacaaacataaagtaccatgtctgaataattctttgattatttgtagggatagagtctcactatgttgcccaggctggcctcaaacttttaactccaagtgatcctcctaccttgatctctaagtgttgggattataggcgtgagctacaccacccagctggcattcttaaatttaataaaacttagtatgtgtcctaacagaatacaccagatgcaaataagaatattgtatattctcttgcttttgactggaaagttttgtactcatgtgttaaacctagttggtctgtaacatggttttgatgttcatgttctccaaaccttattctgcagtgtaatccttaatgttggatgtgagacctggtgggaggtgtttgggtcatgggagcaaagtcttcataaatagctggtaatcaaaatgtttacactccattaattcaaatgtaagcaggtttattagaagaacctggctccttcacctcatacttgctctgtctgttattatgtgacatgtacagttactcttcgccttcaaccatgattgtaagcttgctgagacactcaccagaagcagatgctggcacacactttttgtacagtctgctggattgtgagccatataatctttatttctttataaattatccactcaggtattcctctatatgcaaaatgattaatacggtctgcaatgtcgtctaggctttgttttcttgttgattttttaatctgaattttctatttattattaaaaatggggtattgatgtctacaattatattctatgtatttcttgctttacttttgtcaatatttgctttatatattttggagaccttatgttatatatacatatacatacagataggtagatggatataatcattatagatttgtggtaaatcaacctattttatgagtatgtaatatcagtgtttgtctcatgttagcacttgacttaaaacatatctaatacacaattgtagttactattttcataaaatgtagttgttttttttttcgctctgtggttttcagcctatttgacttagtgctgaaatgattcccttgtaggcaacatactgtttgcttttttcttaagctagtaaagcattttattttttctttttataatttcatttatttacttgtttattcatttatttttgagatagggtctcactctgtcaaccaggctagtttgcagtgttgtgatcatggctcactgcagcctcaacttacaaactcagaagattctctcatttcagcctcttaggtagctgggttacaagtgtgtagcatcacgcctagccagttttttgtgtatttttggttgagacagagttttgccacactgtcaaggctgttctcaatcttctgagatccagtgatcagcccgccttaacctcccaaagtcctgagattacatttctttttattaagtaatttaatttatatttaaaactgcttcttaaaaatgaagttactggttttattgtaactgttttatgtgttcctgagtggtacgttttttcttattcactgttttattgccttaaattttattttaattgtgtagtgatgtgcttcaattatttttctaattttgttttgcacagtttctttaattattatctttataatcatgttgtctattcatgtgttttcatgctgctgataaaaacgtaccttaccctgggcaaattacagaagaaagaagtttattggacttacagtttcatgtgattgaagagacctcacaatcatggtggaaggtgaaaggcatgtctcacatggtggcagacagagagcttgtgcagaaaaactctgccttataaagccatcagatttcatgagacttattcactatcatgagactagtacagaagagacctgcccccatgattcaattaccttccaccacatccctcccacaacatgtgggaattaaagatgagacttgggttgggacacagccaaaccatattattttaaaaaatggagtttacattaaatatcttaaaattcaaacaatatactttaatgacaacttcaattgaatataaaattatacctctatgtttttcagtttgttattaacattaaaaatttttagactgggtgcagtggctcacgcctgtaatcccaacactttgggaggccgaggtgggcggataacctgaggtcaggagtttgaaaccagcctgaccaacatggagaaaccctgtctctactaaataatacaaaattagccaggcatggtggtgcatgcctgtaatcccagctactcgggaggctgaggcaggagaattgcctgaacccgggagggagaggttgcagtgagccaagattgtgccattgcactccagcctgggcaacaagtgcgatactccatctcaaaataaaataaataaatataaattattttgtgtatttattaacatatttatgcagattgtattctgttttaaatattttacagaggagctttaagggttttatgcatcattattatgatagtaaagacttctatatttgtatatttacatttaatatagacttttattttatatgtggttttgttagagaaaataggaggcaggagacacccagtaggtgaaactggaggattttattaaggtgcaccctggcacaatggattcgcatccaaaaagctgagccttggactaagacagggcttgtcttttatacatgcatgggccatctagtggcgcaaagctcgtggtgcaagtaagcaggctcacagaagcagaacagaggcagttaatcaaacagtgacaggttatgctgaccttgcagcttcactggaagggaaacatgaatttatcaaactaaagcaggccttgcagctggtacatgtcttactcaagctcgtcttgtaaccttgtcatgttatccagaacagagaaactggagttgttgtgaagtaaccttgagtttcactaaggaaggattactaaggggaggaggaagctaggagaggaggaaaaattgtttttcccatcattgctctatgggaggagaggggataaggactagttttctttacatcctctacttcatttccccctttgacgctttttataaatgacgtttaatagcatcactatgacttaatttttcatgaaaaggcaagttttcttcatttggcaaaggctgatatttagttagggtcattagttgtgtagtagtttgcctggttacaagagcctctgtggccatttagatgtttttgacaaggaggggtaagagacaagggagtatgaggcagactcctaatatggctagaactattcttactaaggttttaaattctgcaagggatgagaactaacccctgaagagggaatctggagaccatcctttctaagtcttgactggaatatgggctaatttttggattcttgcagctttttgtttgacgacctttccgttgtcatcgatttttagacagcaattagttaggctgaactttctacatactcctccctcttgggctaggaggtagtctaaagccagtctattttgataaacggcatttctcatttctgtagatttccgagccagcaaatttaaggctcttgcagtatcattcgtaatgatctccagtactgcctgcaaccatatgatgtgatttagcatgtaaataggggtgcggtatctccatgatccatctgcccatgtggctgggccatagtattgcattattctttcaggtggccattcattatctttaattctttatggttattccccttttatttcttttgacctgacatgaacctccaactaggttctaggtaaggactttgggtcataacatatataaggctggccacttcctgggttgcagattgagtaggttatctggttgtgtgtacaagttcctcaatgggtccctgcatacctataataagtggtagaacagggttctagtcatggtgcttcctgtctacgtattgtcagtgcagtgggggcatccttctaaggattctccctttaacgtggttaaagggaatagcaaaagtaatgaataacatgtttatacctagcatggagagaagaggtcctttcctagaggaggaggttgagcaaagcaacaggacaatagtaaaacaattaatattacaaggaaagtttccagacgtaagatttctaaccacttttactttcctgatgatgcctcgagctttggccgtacatagacgagtcagcttctggggtgactagaacagggctgttgtttcctcaagcttccaccgtgtgtagactggtcagcttctgaagtgaccagagcagggctgttgtagtcttcattggcacctcggtcccatcataggatcagctgggttggatggcctgggtccttctggctggtccacttgtcttgggctaccagtttcagccaactgtggtgaatccaaggcacgattcctgcaactttagcagcagtgagtagacaagattacaatatggggcccatcccatatgggtcccagtgttgttggattccattttttaaactaaacagagtccccgggtctaaagggataaattgggtctgtgaggcttatgggcattctttcccatacccagccatgaattttttgcatggctattcttaaagcctgcatctctctccttaaggctaattcctctagttcacagagatcacctttaaattggccgaacaagatctcataggtgaatacccagtttgtttggtgggggtgtacctcacttggaggaggaccatgggcaggacctgatcccaccttagatgagtttcttggcaaaatttttttagtagctgtttgagtgtctggttcatgtgttccactttttctgagctctgtggccagtaggctatgtgtaacttccactttattttcaataactgtgttagttcttgaactatcttggctatgaatgctggtccattgtctgacgctagagtcaggggcagtcgaaatccagggataatgtctcttaacagtactttagttacttctcgtgctttctcagtcctgatggggaaagccttgacccatcctgaaaaggtgcagacaagtactaacatgtttcaatatccccctgcttggggcaacccataagcagattttcacaaggtgtggcccctatttcctgcattcccagggtcctggtgggcccctgtattaggttgttctgggcacaagttaggcattgttcacaaatggctcatgtgatggcagtgagccgtggcacatagaagtggtgtcctaatagcgtctctagtgccgtttttcccatgtgagttccttggtggaattgcctcacaaatttggaggccaccatttcagggatggctagtctcacattagataatttccaccatcctccttcaatatgttctccagattcttgggcaaaccaggccctgtcacttagagagtaactccgggtctcctggaggggagattgcgggaggagaggcatggtcagggcttcttttctagagtgtggagcagtcaatgctgtctgtcttgcttctctgtctgcttttccatttcccttggcctcctgtgtccctgacttctggtgtcctttatagtgcataacagctaccttctctggggctcatacagcatctaagagctgtataatttcttctttgtatttatttctttgcccctggcagttaaaactcctccttatatatagcaatgtggcaaaagcatatttggaatcagtataaatattgatctttttgtcctttgctagcaaaagggctcttgttagagctatcagctctgctttttgggctgaagtttctgtgggcagagactgagcttccaccaccaagtgcaatgttactactgcatacccggcccattggactccttccagtacaaaactgcttctatctgtaaagtactcgatatctgggtccctgaggggttggtctgtaagatctctccagcttgagaatacctcatcaactgtgtctatacagcaatgaagagggcctcctggttctgattgaattgggagcaaaatagctgggtttagagtgttcacagtctctagagttacgtgaggatttttacatagaagcccttgataccaactcattattggatttgataaccaatggtgccctctctgatcgattaatgttataactcagtgcgatactcaggtggttagttgctgtcctagagttagtttgtcagcttcccatgccagtagggctgtggcagctaatgctttgaagcatgggggccatcccagcgccatggagtccaactgcctggataagtatgccaccaggcgatgccatgatcccgtgacctgagttaggactcctatagccattccctttcactcatgggcctatagaaagaaaggcttagttagacctggcagtcctaaggctggagccctagttaaggcttctttgatttgtttaaatgccttttcctggtctgcctcccagaggagggacttcttccctgcctcccccacttctaatgtgaccatgggctcctgggggcctagggagaaggaacccggttggtcctagtcctcatattcttaattctctgccagcccgatcaggtcggcatctggctccctcagggtgtggcagcccttggctgggggcctctttgtttcatagcctttgccattctcttcattgtcctctggacattcatttttctagtgtcccttctttttgcactgcacacattgacctccccttagcctcagccatctcttggctcgctgttcaacttggcctcttccatgcccacacccatgtgaacattcgcgtccctttacaatgttaattttcctttttgtgagggctgccgctaacaggttggcctttttcctaagcctctgctctgtttccttttttgcctcttggtcacagttaatgtacacctcggtggccacttctataagctgggtggcattcatgcctgcaaaaccctctagcttttgcagcttctctctgatgtcaccctgggcttgccttacaaatgctgcattcaccatgcactgattttcagcagcctcagggtcaaatggagtgtaaaactaaaatgcctcacagagtctctcataaaactggctagggctcccatcaattcgctggagtacttcagagaccttccttatattgattgccttttttccaccttccctcaatcattgcagctgtgcttcttagtacctttgcaggcgctgaagctgggttgcgtcatttgggtcccagttgggatctgtttctgggaattggccctgagcatatgcctggacattaagggtgccttcaggcacactggcttctagccagcagagagctgcctgggctatcctttgacactccttcgtgttaaacagcgttaggaggagattcctgcaatctggccaggttggattgtgcattaggaagatagactgcattagatctatgaggtcctgggggttctccgtgtaggagggggtatgatgtttccagtttaggagattagtggtagaaaaaggctggtaaataaaagtctgttgccccccttggacctggccctgttcatcataataaataggtccctgtgttttctggaggggcatctgcaaagctctggtgtgggtaaattgaaggtggcctgcttgatcatcttgacttccttcttcacctcctgggacaggggctcagatttgcccctttagggtgtagcctggggcatgataccatctgagttgggctgctcagtggccagccttggtaaaggtgggtagattggtgcatagggaggaggggtttctatctcctccggtggttcctccaaaactggtttctcctgtctttcctgtggctttccctttgtctctgtagcttccagcaaagctgatttttttttggtggcttaggctcagcttgagcaaaaagctgccaggcaagtctgcaaccatgcaggtggagtctgtactatatttaaccatgagtcaatacaagggaactggtctaggtgccctgactgtcctctgaccccagttaccaccttaaatacatagccaattgtttccttatctacatttccttcagctggccatctaacatcaaaagagggccattgtatttcacagagagttctcagcctctgggggtcaacttaattccatagtccccgaataacctttcttaaagttccttaacatacatgctaatcgggtgggttttggtgacttccctcccatttcctccccaatacagcacaacacattcattcttccttttgattcagaccaattaaaccatcccccttgcaggagttttcagacactgcttagctttggagtttgttaatcccctcacaattactaaattgtggggcacctccataagccgtatgtggattgccactagtcccggttggtcccacaattctctcagagcgcacagtctatactaagagagctgtagcccccacatgtcactgtctgcattggttcctcccaaaaccatctctttcacacacagtcacacaccgtcctactcccagttttctctcctaactgacttcgcgagccactcttatgccctagtcacttggggtgtaagtttccctgagtttgcaaaccattcttgcatcctgtgtcagtctactagttacaccttggaaggtgatcaggctccccttccatccttatgggacggttcctgccttgggccccaaaaccttaccgtggtcctgtagtgcactgttcctggaatcatcctgtagccccttagattctgttgtgctgtctgggaggggcactgggttgtgggatagctgatcccttcttcaggtttaagttctcctgatggcacctgaggtcatgggtctctcctggcttggggtctcacacctaaaggcaaagtagacagcaaacctgtcatctccatctcctggctggctcaccaaagtgttgcagaaaacaggaggcaggagaggccagtgggtgaaactagaggattttattaaggtgcacactggctcagtggattcacacacaaaaagctgagccctggacaagtacagggcttgtcttttatatgtgcatggtggccatctagtggcacaaggctcctggtgcaagcaagcaggctcacagaagcagaacaaaggcagttaattaaacagtgacaggttatgctgaccttgcagctgcattgggaggaaaacaggaagttaacaaactaaagctgaccttgcagctgcattgggaggaaaacaggaagttaacaaactaaagcaggccttgcagctggtatacgtcttactcaagctcgtcttgtgaccttgtcatgttgcccagaacagagaaactggagttgttgtgaagtaaccttgagtttcactaaggaaaaattactaaagagacagggaagctgggagaggaggaaaacttgtttttcacatccttgctctttgggagaagaggggctaaggactagttttctctacatcctctacttcagttttatgatggtgttcattattattttatttttaagcaaaattgactcattatagcatttctttttttttttttttttttgcagagtctcagaatgctcttaaactcttagtctctagtgttctgacagccttgacctcctaaaactaagattacaggcatgagccatggtgcctggtcaccatgtacctttttttgtagaactgtgctagtggtgatgaacatcttcaccttttattttggaaattctttattttcatcttctttttaaagggaagtaaatttaaatcaagtattattggttagaaatttttttttattacatcaaaatttgggaagttttcacccttttttatcttcaaataacctctgtattttttttcttcattttcttcttctaagatttcctaaatctagttgatggttatctaataagttgtttgttttgttttgtttttgtttttgtttttgttttttttgagatggagtctcgctctgtttcccaggctggagtgcagtggcacaatctcagctcatggcaaactctgtctcctgggttcatgccattctcttgcctcagcatcctgagtagctgggagtacaggtgcccgccaccacgcccagctatttttttatatttttgtagagactgggtttcaccatgttagccaggatgggcttgatctcctgacctcatgatctgcctgccttggcctcccaaggtatctaataagttttacattccatgttttaactttgttttgcaattatagatttttgtgttatatattttagggtatgccaccacacattcattaattgtgttttgattttttagtatttattataattatgcatgctaatttttaacatcttataatttaaggcagtgtggaagaaagtcaaatatgaatgagctatacgtctttttccaatagaattatctctgtgtttgttttcctgtatacaaaaataaatgttatccttgtattttttttctaacttgtatatttgttgtgtaggtttgttgtgaatggttttctaattctgcgtagatgagtcatcataaaatactctttttttttgagatggactcttgctcttcttgcccaggctggagtgtaatggcgcgatctcagctcactgcaacttctgcctcctgggttgaaatgattctagtgcctcagcctcctatgtagctgagattacaggcatgtgccaacatgcctggctaatatttttgtatttttagtagagacagggtttctccatgttggtcaggctggtcttgaactcccaacctcaggtgatctgcccgcctcagcttcccaatgtactgagattacaggtgtgagccaccatgctcagcccataaaatttttataatttcaacaacctatttatttgtaaatctatatgatttctgtgtgggagaaacacttttggatttgaatataatttaaaactatcataactctgtatctcttttagttattattgtttatttcttgtcaaaaaaaaacaaaatttaccacaaaatatttttaaatatttagtcatatcaattatcttgacattgtcatgcaacatattgctagaatgtttttatcttgcaaagctaaatcttaacacatattaaacaacaagtactaatttttaattttttctttttttcttttttctttttttttttgagctggagtcttactctgctactcaggctggagtgctgtggcatgattcacctcactgcaacttccacctcccgggttcaagcaattctcacgcctcagcctcctgaatagctggaattacaggtgcccatcaccatgcctggctaatttttgcatttttagtaaagatgcagtttcaccatgttggccagcgtggtttcaaactcctgaccttaggtaatctatctgcctcagcctttcaaagtgctgggattacaggtatgggccaccatgcctggccacaattttttctgttttatagcgttttgcaaacaccactctgttttttgtttttaacagtataactacttcatgtatgtcataaaatctgtgtctttttgtgattggctcatttcattttgcataatgccatcaagatttatatttatagttggtagaatatttcctgcttttgaatactgagtatattccagaatatatatatatattttttgagacagtcttgccctgtcacctaggctggagtgcagtggggcgatcttggctcactgcaacctctgcctcctgggttcaagcaattcttttgcctcagcctcccgagtagctgggattacaggcacgtgccaacacgtttggctaatttttgtattttttttttcagtaaggacagggttcaccattgttggtctggttgatctcgaactccttaccttgtgatctgcctgccttggcctcccaaagtgctgggattacaggtgtgaaccaccgtgcctgggaagaatttttatatttcaaattatatctactgaatgatttattgaaagatatttgcattgcttttacctatttgcttacagtaacaatgctgcagcttttccgcgctacctgcagaggggtccatacggcgttgttctggattcccgtcgtaacttaaagggaaactttcacaatgtccggagcccttgatgtcctgcaaatgaaggaggaggatgtccttaagttccttgcagcaggaacccacttaggtggcaccaatcttgacttccagatggaacactacatctataaaaggaaaagtgatggcatctatatcataaatctcaagaggacctgggagaagcttctgctggcagctcgtgctattgttgccattgaaaaccctgctgatgtcagtgttatatcctccaggaatactggccagagggctgtgctgaagtttgctgctgccactggagccactccaattgctggccgcttcactcctggaaccttcactaaccagatccaggcagccttctgggagccacggcttcttgtggttactgaccccagggctgaccaccagcctctcacggaggcatcttatgttaacctacctaccattgcgctgtgtaacacagattctcctctgcgctatgtggacattgccatcccatgcaacaacaagggagctcactcagtgggtttgatgtggtggatgctggctcgggaagttctgcgcatgcgtggcaccatttcccgtgaacacccatgggaggtcatgcctgatctgtacttctacagagatcctgaagagattgaaaaagaagagcaggctgctgctgagaaggcagtgaccaaggaggaatttcagggtgaatggactgctccctctcctgagttcactgctactcagcctgaggttgcagactggtctgaaggtgtacaggtgccctctgtgcctattcagcaattccctactgaagactggagcgctcagcctgccacggaagactggtctgcagctcccactgctcaggccactgaatgggtaggagcaaccactgactggtcttaagctgttcttgcataggctcttaagcagcatggaaaaatggttgatggaaaataaacatcagtttctaaaaaaaaaaaaaaaaaaaatgctgcaataattatgagtctataaatgactacttatatgaccatatatgtgaaagtttatatatgtgctgcattctattttattagtctactttttcacctttatactcatatcaaattgtttaatttggtagctttgtaatgtgttttgaatcaggcactttaatgcctgcagcattctttctttctttttttttttttaatattgttgggtagtttgtttttcttttgagtctctgtatacttttgaggttggtgtttctatttcttcaaaaatgcaatgagaaatttgaaaaatattgcattaaatctgtagattgcattgagcaggatggactctgcaatattaagtatttcaacctttgtgtaagagcacactcaagagtgtgttgtttagtttctatatatttgtaaatttttcagttttttttttttgcttttatcgttgtatattctcattccattttggtcatagaatgtagttcatagaaatttacttttaaaaaatttgataagacttcctttttgtcctaagatgtggtctttcaagggaaatgttgtatgagctattgagaagggtgtgtattctgatgttgttgaggagtgttctccataactctgtttggaataattgttttatactgcctttaagtagtctgttcttttattaacattctttcttgttttagttttattacaaaaagtgtggtattaaaatatattgttctaattatattgctttctgtgtgtttcttccattctgtcaatatttgctttatatacttggaaccctaatgtgagacacacacacacacacacacacacacacacacaaatttgtcatagattccctgtgaatgaatctattattttttgatgtccttctttgtttctttggagtttcaatttcaagcacattttataaaatattatactttctgacttaagatgtagcttgtgtgatattattttgactctttctgctcttatttgattaatgtttgcatggaatgtctacttccatcctgccacttacagtcttttttaattattagacttactgttattttattatgcattttatttgattattgcatctttgtgtcttattctctttccatctttgtgtctttttgatgtttgcattgatatgctttcgcttatttatttatttatttgtttgagactgagttttactcttgttgtccatgctggagtgcaatggcattgatcttggctcaccgcaatctccgcctcctgggttcaagcaatttacctgcctcaacctcctgagtagctgagattacaggcaggtgccaccatgcctggctaattttgtatttttagtagatatgaggtttctccatgttggtcaggctagtcttgaactcctgacttcaggtgatccacccgcctcggcctcccaaagtgctggaattacaggcataagccaccatgcccaacctcttttgtgtatttatacaaatatttttgtggtaccttggggactacatataatgtctaaaagatacaacaatacattttaatctggtagaaaaacaggttgcatacaaaaattcttctttattacatcttccctcaaatttgtcattgatgttgctaattatatcttatgttgtatgttcattaactgatgtttataatgatttctattcttttattgttcaaatttcagagaataattaaaaatgttttctgcgtcactaggataatgctaataaattctacaaagtgaatttgcatattttttctagaaaataatgtatttttatataattatgtgtagctttttgaatcatgttattttcagtaaaaggaactgttgttagcaccttttatatgtagggcatatgcagttccaatatacttttttagaatttcattactttggaaggttttttttttttatttggcaggatagattcactgatggtataattctcacttaataggtattttttttaacaactttttcatgactccataacatagttctttttttgagactaaacgtctctctatcccccagccaggctggagcatagtggtatgacttcaactcactgcaacctccacttcccaggttcaagtggttctccagcctcagcctcctgagtagctggtattacaggcatgtgccaccacacccagctaatttttgtcgttttggtagagacagggtttcaccatcttgtccaggctggccttgaactcctgacctcaggtgatccgtccacctctgcctcccaaagtgcctggattacaggcaggagccaccatgcctggcctggcacatcacttttatcttgcagcttcaaagataatctttttgtctttgactagaaattgtggttatatacatgtttgttataaatatctttctgtgatactagtttgttgtacttctttatttttacatcatattttcttttaggatctattagttttttttaaatttttttacctccacaatttttgtttttttgaaatcttaaatatttttgttcttgtcctcatttttctgaatttccatagttgtctctgttcctattttaatcaatgagaactattcaatttattaccaattattaaaagtaatttatacctctgattttttttatgctttctttcagaaaaatttataatatttttgctgggatcatattgccctattttgtatattttatctttgattgtgatttggacattaaaaaaagctacctgtcaaaatctttataatgttgttctgtcctggcatagtctgaaaacaattgttttggctggtgattatgggagtttctcacacatattcttaggatatgtgctgtctgaaattttgtgtttaatttttaattaacagagtttactcttgttattttgtaggagtcagaaatcacttgctacacctgttccttttctgtggtactgctgtcagtctgctgctctaccacttttttttttggtctcagctgactcaaactctcatttcaaaatatgccaccatttctttcagcactttatgtcatgagagactgaaacaagtgtcagaaaaggtccctaaaagtcagaaataacaacgaatgtgccagtattttagctttcttttaaaacagaaaccaagagttaggaatttacttctgaaggtactacgttatagtggaaagcaggaaaagctgtgttgggtgaatttaacacttcctttttttctttgtgctcacctggaacactgcacacacttatttataaattttttacagatgtatttgggtctgtatattttagttacatttatatatctataaatgaattagagcctgtggtattttgcaatgccctcttgtttatgtatttggtataattttaaaggtaagattttaaaactatatccatgtgagtctagtaggtggagtaatttattatttttatttttatttttttaggtatatgccctcattttgcttaagacctctggccagagcagggcatggaagattccttttaaaaagtaatactgagaagacatgaaaaatgtggacatgataatttactgttgagaaatggctgtaaaagtgtggatgagtgtcaggtgcacaaagaaggttataatggacttaacaagtgtttcacaactactcagagcaaagtatttcaatgtggtaaatgtttgaaagtcctttataaatttttaaattcaaacaaaaaataagatatactggaagaaaacctttcaaatgtcaaaaatgtgtcaaatcattttgcatgctttcacacaaaacccaacataaaagcatttatactagagagaagtcctacaaatgtaaaaaatgtggaaaaacctttaattggtcctcaatccttactaataataagaaaattcatactgaacagaaaccttacaaatgtgaagaatgtggcaaagcttttaagcaacactcaacccttactacacataaaataatttgtgctgaagaaaaactttacagatgtgaagaatgtggcaaagcattttgccagccctcaaccctaactagatataagaggatgcacagaagaaagaaactctacaaatgtgaagaatgtggcaaagcgtttacccagttctcaacccttacgaaacataagagaattcatactagagggaaacattacaagtgtgaagaaagtggcaaagcatttatctggtcctcaggccttactgaacataggagagtccatactagacagaaaccctacaaatgtgaagaatgtggcaaagcattaattcaattctcaaccctaactagacataagaggatacacactggagagaaacccaacaaatctatgtggcaaaccttttagccaaaactcaaaccttactatatataagataattcatactgaaaagaaaccctacaaatgtcaagaatgtggcaatgcttttagccagtccccataccttactacacataaggtaattcatactgggagagaccctacaaatgtgaagaaggtggcaaagcatttctatggttcattaccctaactggtcataagaggatgcacactggagagaaaccctacaaatgtgaagaatatgaaaaagcttttagccagtcatcaatccttactcgacataagataattcatactggagagaaaccctacaaatgtgaagaatgtggcaaagctttcagccagtcctcaacccttactacacataagagaattcatactggagagaaaccctacaaatgtgaggaacgtggcaaatcttttaacctgtcttcaagctttactaaacataaggtaattcacagtggagtaaaaccctacaagtgtgaagaatgtggcaaagcctttaggcagtcttcaatttttgctaaccataagagaattcatactggaaagaaaccctacaagtgtgaagaatgtggcaaatcttttaacctgtcttcaagctttactaaacataaggtaattcttactggtttaaaaccctacaaatgggaagaatgtgccaatgccttttcctggtcctcagccctaactaaacataagaaaatttatacttgaaagcaaccctacaaatgggaaaaatttggcaaacctttaatccttacaacttaatgcacataagataacttatattgaagagaaatattacaagtgtgaataatgtgtcaaagcctataaaaagtcctcaattctttacagacataaggttatttatactggagagaaactttgcaaacctgaaagatgtgccaatgcttttgacaacaacttaagcttttctaaacataaagaaaatcatgctgctgagaatcctagaagtgtgaagaatgtgacaaagcctttaaatgattgtcacacttgattgtaggtaaggtaattcatactggagataactatcagtgtgtacaatgtggccaagcttctaactaatgctcacacgttattgcacaggaaagcatttataagcatttatacttgagaacaaatgtgcaaatataaagtaaaaaagccattaatacctgctcacatcttactcaaaatcagatagttcatatgaaataaaagcataaaagtgtaattactgtccaaagatctattagaaaatatgtctttaaagtgcagaagagtatttactttaaaaaagcactacaaatataaatagggttgtaatacctttacttgtatcagaaatcttattgtacacattttgtgctagaggaaaaccctgaggcagttgttaaaattttgtccaacatcagtgagtttatattgaagaaaaccctgcaaatataataaatttggaaaaacattttttcaaaaactacaaattataaaacaccaaagagtttatactaaaatatatttttgcaggtgcagtaaagatgaaagatatttaatccaaaattgtctatgtaaatatcagaataatccacagtagaaatatctagggccactcaatgtttagacactactgtaaatcagagtgctgcgtataaaaaataatacaaaactatagatagcataaacattatttgtatataactttaaaagaagtagaatattttttggagagttataattacattcaaattatactttttatgaacatacaggtttttttcgaagtgaataataatgaagttaaactcttaaattacttcatgctcttccatattcctggtttattcaaatgtgaaagcatgtgactaattgttgctggacaaaatatatgagagattcttgtttattaggtaagcattacttatgaccttttctatggaaaggtaaggacattaaaatgtaagatgcataatgaaaatttaagtagagaggctctttgtggttaacttataatattttgtgatacatgaggtaggtgttcagagtaatactcttctacattattatgaaagaaaaatattcttaattttagttaaaattaggttagtaatgttattttattaattgcacttttatggaatactatacagcatatttttaaattataaattatttgtgaaattaacttttcaattccacatttttaacatgttaaatactatcatgaatccattgaaatgttattgtgccactaactttaacctattccatcttacacaagggtgtaggtaacaatacattatttggtaagataatggactgacatcactagtaatctttattgccagtaactttaaatggccaataagttaaaaaatattgttcctataggttatatttttattcttattttcacatttaaatgtatttttcttaatttctgtggatatatgtttatatgtttatgccatatatggcatattttaatacaggaatacaaaatatgataatcacattagaggaaatgagatgtccattacctctagcatttattctttgtattacaagcaattcaattctacagtttaagttatttttaatgtacaattaaattgttattgactacagggtcatttttatcatcataatacaaattatatacaaacatgtaaaatccatacatttctgagtccttaataaatatttttataaattttaatatatttttctttgaacatgtggcctttgcctgcaagcacatatggactgttagtattgatttacatagagttaaatattcacatctattagtctaaagataaactttaggtctaaataaattatggagtaagtctgtttgtgtgagtataaatttgaaactatttttagcagaaaaaaatattagaacaaaataaatcattttaatcaggggcctaattcactagaaaacaaaaattctcaaaaatggtgaaagcaaatctatgctctctgctttgtattgaatttattaccgtgcaatcttttggctcagggttcagaatctccccatgcaaattctctgttttaatttgactggtactcatgctagtcccgtaatattctttttttgtttgtttaatagtttttttttttgttgttgttgttcttgtttttttcttttgagatagagtcttgctctgtctcccaggctggagtgcaatggtgagatcttggctcactgtagcctctgcctctcaggttcaagcagttctgcctcagcctcccaagtagctgggattacatgtgcccgccaccatgcccagctaatttttgtattttcactacagacagtgtttcaccaggttggtcacgctggtctcaaactcctgacctcaggtgatccatccacctcagcctcccagagtgctgggattacaggtgtgagccactgcacccagcctgtgtaatagtttatgaagtattcattatgtgaactggtctgtaattataagaatatatatttttttaattttattgttccataagttattggggtataggtggtatttggttagataagtaagttctttagtggtgatttgtgagatcttggtgcacccatcacccaagcagtatacactgcatcatatatgttgtcttttattcctctcccttcccactcttctccccatgtccccaaagtccattgtattattcttatacctttccattctcatagcttacctcccacatatcagtgagaacatatgatggttggttttccattcctgagttacttcacgtagaataatagtctccagtctcatccaggttattgcaaatgcttttaattaattacttgttatggctgagtagtattccaacacacacacacacagacacacacacacacacaccccacagtttctttatccactcgttgattgatgggcattttggttggttccagaattttgcaattgtgaattgtgctgctagaaatatgcatgtgcaagtatctctttcaaataatgacttatttttctctgggtagatacccagtagtgggattgctggatcaaatgataattctgcttttagttctttaaggaatttccacagtttcctatagtgactgtactggttgacattcccaccggcagtgtggaagtgttctttgattgctgcatccatgccaacatctacagttttttgatcttttgattacggccattcctgcaggaatagagtggtatcgcattgtggtttgatttgcatttccctgatcattagtgatgttgagcattttttttaatatgtttgttggccatttgtgtatcttttgagatttttctattttttgatttttttcttactgatttgagttcattacagattctgtatattagtcctttgtcagatgtatagattgtaaagattttctcccactctctgagttatctgtctattctgctgactgttccttttgccatgccaaagctttttagtttaattaggtcccagctgtttatctttgtttttactgcatttgcttttaggtttttggtcatgaaattttggccaaccaatgcctagaagagttttttcaatgttagcttccagagtttttatagtttcaggtcttaggtttaagtccttaatccatcttgtgttgatttttttttaataagatgggacatgaggatccagttttattctcccacatgtggctagcctattatcccagtaccgtttgttgaaaagggtgtcctttccccactttatgtttttgtttgctttgttgaaaatcagttggctgtaagtatttgggtttatttctgggttctctgttccattggtgtatgtgcctatttttataccaggaccatgctgttttggtgacttatagtatactttgaaatcaggtagtgtgtttcctccagatttgttcttttttcttagtcttactttggctatatgggcttcgtatgattttttgaattgttttttctaactctgtgaagaatgttggtggtattttgatggggattgtgttgaatttattgattgcttttggcagtatggtcattatcacaatattgattctacccatccatgagcatgggatgtgtttccatttgtttgtgtcgtctatgatttctttcagcggtgttttgtagttttccttcttttggctccttcattaggtatatttcctaagtattttatttttttcagctattgtaaaaggggatgagttcttgatttaattctccatttggttgctgttggtgaatagaagagctactgatttgtgtacattaatcttgtatccagaaacttttctgaattttgtcagttctaggagctttctggaggagtccttagggttttcaaggtaaataatcatgtcatcagcaaacagggacagtttgacttcctgtttactgatttggatgcctttatttcttgtcttattgctctggctatgatttccaggactatgttgaagaggagtggtgagagtgggcacccttgtcttgttcccattttcagagggaacgcttttaacttttccccattcactattatgttggttgtgggtttgccatagatagcttttattacattaagctgtgtcctttttatgccaactttgctgagagttttaattataaagcgatgttggattttgttgaatgttttttctgcatctattgagatgatcatgtgatttttgttttcaattctgtttatgtggtgtatcatttgttgacctgtgtgtgttaaaccatccctgcatctgtggtgtgaaacccacttgatcatggattatctttttgacatgttggatttggtaagctaatattttgttaaggattttagcattaatgtttatcaaggatatgggtctgtagttttctttttggttgtgtcttttcctggttttggtattagagtgatgctggcttcatagaatgaattagggagagttctttatctagtgtcaaaaggtttggtaccacttctttgaatttctggtagaattttgctgtgaatctgttggatttttttttgttggtggtaagttttaaattaccattttaatctcactgcttgttattgatctgttcagggtatctaattcttcctgttttaagctagtagggttgtatttttccaggaatttatccatctcttctacattttccaggaatttatccatctcttctatgttttctagcttatgtgtatgtgtgtaaaggtgttcttaggagccttgaatgattttttgtatttcagtggtgtcagttataatattctttagtttcatttctcagtgaggttatttggattttctctcttcttgatcaattttgctaatgatgtatcaattttatttatcttttctgagaagcagctctttgtttcatttaccttctgtattttttgtttatttgtttgtttcaatttcatttagttctgctctgatcttgattatttccttttttttctgctgggtttgggtttcatttgttcttgtttctctagttccttgtctgtctgtgctctttcaaactttttgatgtaggcatttagggctatgaactttcctgttagtaccaccttagctgtatcccagaggttttgataggttgtatcattattgtcattaagttgaagaattttttaatttccatattgattttgtttttaacgcaatgctcattaaggagcagattatttaatttccatgtatttgcatggttttgaaggttcctttgggagttgatttccagttttattccactgtgatctgagagagttcttggtataatgtcaattttcttaaatttattgaggcgcgttatgattgtctctgctgattcattcagggtgtcagggacgtgggggaaagctggcagtcacaggcctcactcagctccagtggaaaccaaaaggctggtctcacacccactgcacccctcacaacagccccaaatctgtttccatgtggagggcaagttgggtttgaaaattaccccaggctttctgtttctcagtgtggtaaaataaaaaggctttagttcttccccacctgtgaagtgttcaagccagagtcacgccttccctgagttcttgccaggaggcttcttgccccattcaaattgttatgaagttcagctagggaaatccttctccccttggagttttaccccttgcttctctgtcctcctccctctcccatggattcctgtggtgccaggcaggaatgggctccttggggattcagcgagctcccagggcctccctgttgcctcctgaacccctgtatttcactcagcttggctctctaacttgactcacctccaggtagtaaggagcttctcccacaaacagactttcagtttctccagtggggtcgttgtgttcaggagaagagagtctccctttcccacttctgcagtggtggcactcactgtatttggggtgtctgtcaggtcctgcaggagcagtctgcttccttcagagggttgtcctgatgcctttaaggacatattctgaagataaaggtggtgattttttcagatactctctcctgagaaggaatcagagaagagagaaaaaatggttgattctcaaatgaatgtgtcccaggtcaaaactgtgtccacattttcttctagaaggtcatgtatttacagttgcaatcattttcatttctacttctgatgcttttgcctaacaagattatttgaagtaccttttttcttctcatgacagtgaaatgacctcattaaaataattctcccctatgtttcagagccttatctttattctctccatccaggcttcttacatatcacaaatagtaccttgaatttataccgtgaaatattgaaagtattccctttgttgacagatcagcctgagcaggtgaagatataaaacattcttattggggatggtgctgggtcctcagatatcagtgagggagaaaactgcaccatttaggttctatctgaatgctccatcagctctatgaataacacaatttttaaatgcacacttaaaaaagatggaattaatggcctggaataatttagaaagatatgtaaaggaatgaattcaaagaaatgtgccttctagaatgcttaaagagagagtatttagatacactattagaaattacaaaacatgcgctgggcacggtggctgacacctgtaatcccagcactctgggaagctgaggtgggcagatcacctgaggtcaggagtttgagaccagcctgaccaacacggtgaaaccccatctctactaaaatacaaaaaaaaaattagccggacactgtggcacgtgcctgtaatcccagctacttgggaggctgaggcaggagaatctcttgaacacaggaggcagaggttgcggtgagccaagattgcaccattgcactccagcctgggtgaaaacaacaaaactccgtctcaaaaaaaaaaaaaaaaaaaaaaaagacaaaacatggacatcgtatgtgccttgaactttacataaaacatgttttttatgattagattcagattatgatttatgtttttttggccagtaatctcacagaagtcatgttgcatcctccaatatgtatcagcacctgataccaatctgtctcattaattttatttacttggttaacgtgttttctcaaggatttcttccctataatgtttcttttaaaaaactgtattatttgggaggccgaggcaggcagatcacgaggtcaggagatcgagaccatcctggctaacatggtgaaaccccgtctctactaaaattacaaaaaatcagctgggcgtggtggtgggcacctgtagtcccagctactcgggaggctaaggcaggagaatggcgtgaacctgaggggcggagcttgcagtgagccaagatcacgccactgcactccagcctgggcgacagagccagactccgtctcaaaaaacaaaacaaaaacctgtattattaacaggtactttggagaaactttctgactaatgtgcataaacaatcacatttaatctgaaagctcccctgtcacgccaagtgtcaggttccaacccaatcggaggtctgacaggagtgggtgggtgatttgtgggttactggaaaaacactcatggaattgtgggcagttttgagatggctttattctctaggcataagcctgggcatgagccctgtgtacagggtgagcagcttactctctctcctcctcctgttcacctgtctgtgtactccttacactcagtagcggctgagagctaagtatgagcttatacaaccaggttacatattagcagagatgagcacttgtactccaaacttactgagtcaggctgaaccagatgtttaccacggcctattcttgaccactgcacatccatttatcttacaccctttttctgaatagtttctctttgtttatactttgctttggaaaatgaaggctgtcatttttgtttactggtcatatacactgggataaaacccaggttctatcagttactagatgttttacaaagtattttccttaagctagaatgattgacatcactggtgagtttgtttgcaatatagtaactcaggtctcatcccacatcccttgaattagaatacgtattttaacaaaatctccaggttattgatgtatgcattaaaatttgagaggtatctcctaagttactgtgacttctccatgtgagaactgtacacagcttactctgtataatctaaatatggcattcagaactgtatatacttgtgtttatgccataagttctatgccgtgttattcagaaaactatagtaattacactggttttttggatcttattttatcctctttgttcagaatgaaggaatgcattagagaatctttctctgttaagcaatattttattggataattccagtctcttatgtaaaacagagccaactctcttaactctgaaacacctagagtaaaattaacaattctgcccatgaccacttgctaaatatgtgtgttttttttttttttaggaaatgttaactttcaaggctgtggccatagaattttctcaggaggagtgggaatgtctgaatcctgctcagtgaaatttgtatagagatgtaatgttagagaacaacagaaacctggtctctcagaataaattttcaccagatttcctaatataccctaaggcttctattttctccctttgtagaatgattttgggagtttttgctccacataaattatttttagatcaacccttttaaggaaaacttgacggtttattgaaatagaaaagaaaatcttcaagatgttttatcttaacaggaaccatccccttttttttgaggtaatctgtatccttcactctagattaatgataattctagaaattcagtggcattaaatattattgcccaaataataaaatccaatatccagcaccaattttaaattcaatagtattggatagtagagctaaggacccagaaatgtaaaatatgttctaagtattctaaaggttctgtcagaaaacagtattttggaattaaatttctaaaatctttcataatattctctcctctgtactaaacatggtactaggatggtaactggagaatcccaacaaatcatgttaacttttttctaacaaatcaggctgtggtgtctctgtacctgatctgatctcctgccttgagcaaataaaagaaccctggtatgtaaagagacatgagacagtggtcaaatactctggcacgtaagcatgaatgaagcagataacacagacaagaggtacaaaggtcaaaaagaattccagaccttaaaatgtggtatgggatgctctgcttcaatggaaaggttcctaaaaagccattttgtttttttccctagttcttatataggagcatcttttgtcccataccattaaattctttatggactctacttcctatttagtgattttcctttgagggtaccatgagagctaaagtcctctttatggcttataaggtactgcatgatatacctgctcttccattgctttggggcaatatgagaatatctctaactatttttgagaaactgcatgttagatcatttgttaggttttcttttcccatcatatctgaaatgtgtgagagcagtggtgatattaagatttgtttcagaaatctcaggaacatcaatgacatgttacttgttatttatctatattgtcttgtcttttcttttttcttctgttttcttttttttgagatgaagtttcactcttgttgccgaggctggagtgcaatggcatggtctcagcttaccgcaatctttgcctcctgggttcaagcgattctcccgccgcagccttctgagtagctgggattacaggcatgcaccaccacacctggctaattttgtatttttagtagagatggggtttcttcatgttgtccagcctggtctccaactcctgacctcaggtgatctgcctgccttggcctcccaaagtgctggaattacaggtgtgaaccaccgcacctggcctctattttttctttttgatattaggaatcttaacagatttgaagtgatagctcatcgttgtttttgtttgtaattgcctgtttgtgggggctatttagcactttttaaatatatctattggtcatttgtatataattcattggcaaaatatttcttcagtgttttgactatttttcagttggtttatcattgttattatacttgtctttgctttgaattttctatatattttgaattttaaacttttcttgtatgtatggtttgctattgtgagcatgctgtgataaacatgcaagtataggtatcattttcacataataaactatttttttgggtagatacccaatggtgaaatttctgaatcaaattgtagttctatttttagttatctgagattaagcatactcatgttggctatttgtatgtctttattgaaaagtgcttagtaatgttattggtccatttttcaatgggatttcttactatgcttttagtttgagttatttgtaaattccaaatataagtttcatgttgtcacatagtttgcaaatatgttcttttattctttaggttgcctatttaccctgttattttatttgctgtgcaaaaactttttagtttgaatctaatttgtccatttttttataatataataataatataataacaattttctttgttgtgttcatggctagttttggtagcagggtggtactgacctgagagtgacttaggaagaattttattatcctcaattttttggaagagtttcaggaggatttggtagaatttttatacatttggtagaatttggctgtgcatttatctagttctgagcttttctttttcaagacttttttttattactgactcaatcatgctactcattattggtttgttcaggtactcagtttcttcctggctctatcttgggaggttgtatgtttccatgaatttattcattctttgtaggttttcaggtttatgagtgtctagttgtttataatcattgctagtgattttttgtattgctgttgtatccattgtaatgtctattctttcatttctgattttgtttatttagatttctattctgtttgtggttaatctagctggcaatttataaattttgtctttttgaaaaagcaactttttattctattggtcattcttatagtttttggtttttatttcatttggttctgttctgatttatgttttttttttcttcttctaacttggaattttgtttgttactaattttctagttccttgaaatatgatgtcaggtccttaacatgtaagctttctacttttttgatgcagacatttaggctataaactgccctcttagtactatatttgatgtatctcacaggttttattatattgtgtttctatttccatcttttttccccacacatttttaattttcatcttaattttctttttgagatgagttttactctgtcacctgggctggagtgcagtggaacaatcttggctcactgcaacctctgccttccatgctcaagtgatctttttatctcagcctcctgagtagctagtatcataggtgcgcagcaccacacctagctatttttaaattttttttgtagcaatgcggtttttgcatgttgctcaggccgtctcaaactgctgacctcaggcgatccacctgcctcagcctcacaaagtgctgggattacaggtgtgagccaccacctctggctggccatcctaattacttcatttacagtgactgtttgggatcatgttgttttaattgtttgtaaatttatagtttctgaaatttctcttgatatcaattcataattttattctactatggtctaagtaggtagttgatataattttgatttttgggagtactttgttgatttgccagctttcctatctcaatggtctctctaatgctgtgagtagaatgctgaatttctccactattattgtgttacctatagagatattgtgttacctaaagagatgtgtccatctctttctataggtttaataatatttctttttaaagtctgttttatttgatataagacagatactgctgtctgtttttggtttctgtttgtgttaatatctaccccctttacttttagtttatatgtatcttacaagtaaggtgagattcttgtaggcaacacacagttggatcattttttcttattcatttcataaatctatacatttcaatgaaggttttaattgatttatattcaagattatattaatattaaggctttgttactgtcataatgttaattattgccttgttttattttttctttttatctatttatatttgtggtttaataaaattatgtcctattgtgatttatttatttctctctttgttttataaggcctgttttatacttttatatgttttaatgatggtgaatatcaatcttttgtttttatattggaaatccctggaacatcttttgtaggcccagtctattggtagttagtttccccagcctttatttgtcaggataagactttatttcttcttcacttgtgaaggttaatctagcttgatgtaaaatttttggctggcatttttctttcaacactctaaaagtaccatcctgttctcttctggccagtaaagtttctgctgagaagtctgcttttagtctgatgtggttctatttataaatgactagatgcttttctttggctgattttagaattacttctttcactttgagtttagatactatgattattatgtgccatattgaggtctgttttgcattgtattctggtggtgattgctgagcttcctgtatatgtatgtctaattctattgctagagttgggaagttttcatcaattattttcttaaataggttttctaaactttttgatgttttttattcctcagaaactgataatttttgtttagtcactttatgtagttgcaaatatctccaaatctttgttcattctttttcatttctctccttatttttgtctcagtaaattattttaaaagacctgtttaaaggtctgaaaattctttttatgcctgtttcagtctattattgaatttttgaatgtattttctttttccttcattaaatctttaagttctacaatttttgtttctttttttttttctttaaggatgtctatctccttggcacatttcttactcatactctaaatttatttatttatttttatattggttttcagatttctcttgcatctctttgtattggggaaacccacccccaatatttcaacataggttctttctgttttccataaatgtcagccagtctgagaaataaagagaaagagtacaaagagaggaattttacagctgggctgccgggggtgacatcacatatcggtaggaccatgatgcccacctgagccacaaaaccagcaggtttttattaaggatttcaaaaggggagggggtgtaagaacagggagtaggtcacaaagatcacgtgcttcaaagggcaatatcagaaactcctgataagagcctatgttcagtggtgcacgtattgtcttgataaacatcttaacagaaaacagggtttgagagcagataactggtctgaccaaaaatttaccaggctggagtttcccaatcctagtaagcctgagggtactgcaggagaccagggcgtatctcagtacttatctcaaacacataggacagaaattcccagagcggccatttatagacctccccccaggaatgcaattcttttcccagagtattaatgtcaatattccttgctaagagaagaatttagggacatcttccctacttgcacatccatttataggctctctgcaagaagaaaaatgtggctctttttgcctgaccccgcaggcagtcagaccttatggttgtcttcccttgttccctaaaatcgctgctattctgttctttttcaaggtgcactgatttcgtattgttcaaacacgcatgttttacaatcaatttgtacagttaacacaattatcacaaggttctgaggtgacgtacatcctcagcttatgaagataacaggattaagagattaaagtaagataggcataagaaattataagagtattatttgggaagtgataaatatccatgaaatcttcacaatttatgttcctctgccgtggctccagccggtccctccgtttggggtccctgacttcccacaacatctctccctttctttttatataaacgtgccatggcgatgaaggcttgttcattctctcaatttttacacatgattctttgactggtccagcacactaaaaacaagccgattaaacagataatcataataccaaacattactacaatggagcccctggtagacttaatccaagtcatggggtttagtccagaaagactttctgccacctgatctaatgtataactccaggcacaatgtataaaccagcttgagagacttcaaaaatttgtttctttaatttagttatgtccaaggataaattatcttccctactgagaaggtgtcctttgaccatttcccatgaatgatcagtcttgttgtaggaatatggtgtgatacagaaatcagaagtattccaattgtactgcatttgcatgtgatgatcgagactcattagctgatccccaagccaaataacagactgtcttaaatcattcatttggtgaactaatttttgattgatgccttgttgagaattccacatttgggtggaattggcttgccaatcattgacaaaatgagccatttgaatagattggtgtaatgccactccagcagtggtgaccagtgcagtgactgtaattacacccatgatcacagcaactaaagtgaaaacaaatctcttagctcttttgagaattcattgtaacattcattaattaaatatactgagggggaagattcccaaggtctgggtaaagttaccagtatccagattccttcttgagctcgaaccaacatttcacttttcctggagtcaaaatgggagttaatacaagtgtataaatgacaattaatacattgggcagtttgtccaaattttgatatttcccactaacagcatgtaaggaggcttaacacaactctgtataggaatagtcagattggaggtaaacaaagcagaatgcttgaatctaccttgatactgagggaggggagcagcagtggcaatgcccgatgttctccaccataatgaagcaatctgaggtgcccagggatgccaaagaggtagaggggcatacctggattgagaagaattataatgccaattagggtcccataaaggaagattggcatcaaaaagaggaaaagggtttaaaggggatttatcatggggttcagaatcatggatgcgaggggcagcagtggtgacaacagacagaaaagtttccgctttccatactcacagcccggacatggcaatagccaatttccaaagttctgggtgttctgggcacagaatggggaatatcatacgaggcctcaggtgggtaatgcccttatcttcccatttcaagggaaagaatgagctgaacctcctatccaaagtagaatgatgatcctcatccttccaataagaaataaaataagtagcctccaggcattccctcctgccagcggagcaattgttttttaaatagccctttggtgcccagtctattactaaaccatatgagtcattttttttaatactactgcatgtcagttaacacaatcttcccaaattaaagtttcagatgggccctcaacatttttaggacatagttttcctacaggtttatattgaaagtatggggtatctcctattgctccccttttcatttgtcttaaaggagaaagggagaggccagagaccaaatgtcccggttctcttgtagttaatctctccggaagataagcagcccagacttgagtttgtagatggatacaaccaggtgcatgtctgaggcacagaggagggtatttataacccctagtaacattaaatgcagtgccgccttctcctggttgagtggggcaatggtcatctctagctccaggcatccacacactattgttagtatagatttctgcaggagcatccatccagatgagaggtcaaataagtggaggaaaaggcacataagcctaataagaataagtatgtgtagcaggtaagtcagtatgaggggaaattggtgagacagaaagtataaggaggagaaatattaaataaaacctattgtaagcaagatccagtgctgaaggaggaagagaagaacagagggatgttatttttaaggctaatagaaatggtgagattttttggtttaggagaagtgggattagttagaggggtctccattgccattagggaggattgaaccagacccattttgatttgtgtgccagtttctaaggaggtggcacagatctcaccaggtatgagggtggtctctgacacagacgtcttttctctgtggtgttcattgtcagtattcacacgaagtttaagtctcctagtgggcacccagacaggggattgatgatctcctggtgaaacacaagcataccctcttccccacgttataatcgctccaggttcccaggtattggtctgggaatttttccataacactggcttgccttcatttagggagaattttttttgcctgtataatggctttcagctgcagtcagagtattgtctttaggaacattcagaaagtttgaagtaaacaatgctaaatgtaattgggaatggggagtggttaaattattcttttgttgtttagactgtttggacaattgagtttttaaggtgtgattggcccgttccacaacagcctgtccctgaggattgtaagggattctggtaatatgggaaattccccattgttgcataaataaatcaaaagccttacatatccaggggcattgtctgtttttatctgatatggaagccccataactgcaaagcaagaatacttcttttaacatgggccttgccttctcctgtttggcaagtagcccaaataaagcctgaaaaggtgtctacagaaacatgtacatatgaaaatcttgcaaaggagctaatgtgagtcacatccatttgccataaatctttaggagttaggccctctgggattaataccaggttcctgatttggaagtataaaaacttggcactgagagcagcagtggacagtaagcttagcctctttccaggtgagagcaaatttatcttttaatccagcagcattgacatgagtgagattggaacttctgagcttcttgggttgcaaaagagaccaaaagtctaccttttggttaccagcagccatgggtcctggtaaagtggtatgagatctaatatgtgaaatatagaaagggtgtctacattggtgaaccacctgttgtaaccttgaagataagccaattcagaattatcaatatgtttaatagtagcagtttctatatttttagtggcatgcataacataagcagaatcagagacaatatttaaaggtttggggaaaccctgtaaggcagtaattacagcaattaactctgccttttgagcagttgtataaggggtagaaataagcttgtctgtaggacccacataaccagcatttccgttactggagccatcagtgaacgctgtaacggcctcaggaatgggctgatctttggtcagtcgaaggaccacccaataagtcatttttataaaatcaaacaatttgttttttggaaaatgattgtcaataacgctgataaaatcagccaagtgaattttccacagtatggaatgttgagaagcggcctgaactttgagccgatttaaatgaaccacaattaaatttggatcaaatccggaaatttgaactattctacaccgagcttgtccaattagggtggctattttagaatgaggaagaaaacaccactctactaaatcattatgttgaactattagcccagtaggggagtggaatgaagcgaaaactagaagctgaaaaggctgagacagctgtaccctagacaactgggcagtttggattcttctatgaattgcagttccaatgaagcctcaggggtcaaagttctgggactgtggagatgggaatcttcatgcagcatagaaaacaagttagcacatatgttggaatgcctaaagtaggtcttaaataattaatgttacctgctgagaccagctcggttggggagaccctaacccagcggcgctagaggaattaaagacacacacacacacacacacaaatatagagctgtgaagtgggaaatcaggggtctcacagccttcagagctgacagccctggacagagatttacctacgtatttactaacagcaaaccagtcattaacattgtttctatagatgttaaactaactaaaagtatcccttaaggaaaacgaaaggatgggccaaattaattgcagcaggaagatgcccttaagacacagatcactcatgtttttgtttgcggcttaagaatgcctttgagcgattttccgcctgggtgggccaggtgttccttgccctcattcccataaacccacatcctttcagcttgggcgttagggccattatggacatgttatattgctgcagagattttgtttatggccagtcttggggccagtttatggccagattttggggggcttgctcccaatagttacccaaaagtttttggaaatcacttaaggttttcaaagaatctctcctaatctgaacattttgaggttgaatacattctttatcaactgccattcctaaatatggaacaggaggtgtctgttgaattttatcctgagcaatgtgtaatccagcttctgtaactcagcggctcaaaaattgataacagtcaattctttgtcagtggggtcagcaattaatatcaatataatgaagaatataggcctggggaaattgagctccaactggtgaaagcatctgtccaatataaagctggcagatggtagggctattcagcattccctgaggaagtactttccattgataatgaactgcaggctcctgattattgatagatggttaaggcaaatttttcacaatacgatttatgtaaagcagtatgaaagaaacagtctttaagatcaataactatgagaggccaattcttaggtattaaagcaggggcaggcatgacaggttggatggctcccataggtttaattacaacattaatggcccttaaatcagttaccatccgccacttgcctgatttcttttttactagaaacacatgagaattccaggggggaaagaagattccacatgtccaagttgtaactattcagaaaccaattgagttaaagcctccagtttttctttagagagcagccactgatcaaacaggtgtttccaatttccattataaaggcataggattaggaggcatggcattggctgccattaaaagggataacgtaaaccatccctgtcttcttttacagtaacttgaagaggtttagtaattccttcatgttttgggctggtaccgagtctgggaacaaaccccatgtttttcattatatgttgggtgggagcactataagagttatgtggaatattaatttcagtcccccattgtgccagcaaatctctaccccaaagattaatggggattggcatgatataaggctgaattgtacccttttgaccatcagggccagtgcaaggcaagataaatgttctctggggaatttcatcagcttttccaacacctactagtcccatgttagtgggatgtttaagccaggaggaaggccttaaattagaggaaataatagaaacatcaatcccagtatctactaggccatcaaacttttttccttgaatgtgtttggtgcaggtggaccattgtttagaaattacattaatccaataagcggctttttcactgctggagcccatcccagggccccgtgtcttatctcctttgtttaaaacaatattaggtagtaaaagtaattgagcaactgactcactgactggaatggaaacaggaaccttggcagacaccataagtttaatctcattacaggaatcagaattaatgagactagtatgaacagtgattcctttagcagaggtggatgccctacctaacaccaggcccactgaaccttgaggtaaagggccagtgacccccgtggggacaattacaggcaaagaattaggtagtaaatttagaggaatggtactacagagatctactgctccacccccctactgtgaaggtggacaagcattgtactgagacagaagaggctgggacccacctgggttggctgtaggtaaatttgtttgtgctgggggctgcattgggactgcttgaagtgggaacacattggtctgagtctgaggtgttccatttgatattggggcctgggactggccctgctttctgtttccctggttctgtggcaagggatttccatctatatcagacttagaatggcaagtacttgcccagtgtttacctttatggcaatgtgggcaaacagtagcagcagcatttggctgtgtttattgagccagcttggctgcttttaagtttttaacaatgcaatttttttgagtatgaccaagttgactgcaattatagcaggctccaagaaaagaatcagttgagccagtttgattgccatccttcgtggcccatgcccacagaatagctttgtgggtctctgatctaatgccttcacaagctttaatatatgcaggcaacaccttgtgatcaggtaaattttgtcgttggatggaacgaatggccattttacactcatggttcgcattctcaaaagccaacatatgaaggagaataccttgagcgtgctcatcagagacagatttttgaacagcatcttgtaatttaaccaaaaaatcaggatataattcattgtgactctatttaacagtagtaaaagaaacaggagcttggcctggggcacgtaatttatcccaagctctcatacacaactttgttacttgttccatggtgaaagcatcaaaacttgattgaacagtagtatcagattaattatcagagcctgtgaactgagcttgagtaattagaatgccatcagcatgatttagctgagcctgcagacgggccttctctgaccacaaggtatgcaattgtaaatgctgagatggagttagaacagtttttgccaaaatgtcccagtctaaaggaagcagaatgacctcagtacaaagagtctgtaataccattttagcatatggagaagtaggaccatactgagtacaagcatccttgaattcttttaaaaacgtaagattgagtggcacatactgatgcacttgtatccgagcatcaggaggttccagcacgaccagataagcccacacctctaatccacttgtttgtttgttttggcataataagcgttgggtggaagtttcaagagcaggaacatgagacagagtcagcatagaaatgacaggaaaagcatgtgtagataagggaaactgaggttgaggaagtcagactggtatgagagtgtgagaaaggggcatgggggagcagaagaggcagaagcatactggtgattattggcgtccatgcatgaagaagggtacagagaagcaggttgaatggatggcaaagtgactggatgagggaccaaaatgacaggagggtgaggagctgcagtagatgggggatggtctgcagaagtacaggtgaattgtagtttggtcccagagccattaggtggctccggaggcaaagaccgcaaaggtttggagagggaagagttagcatagatatggtcctgggctgtctgtgtcagggccgtgagagccacaagtattggttcttcatgaaaagaaataagatcatctgggggtgacattaagccaaagtcaccagagttagatattgaatcctcaacatcatcaggtgggggaggagtaggtgaagggagacgctgagcagataacaaaggccgaacagaagaggaaagctgaggaagaggtagagagagggttgccagattcagaaaattgtggtaactgcagggggttatgggattggtatgtcattaggatggcacttacaaggccaaatcaccccaaacggtgacaggaacataatttcctgtcgggaccagttcctggaatcttacaccaacacgatcccatagttccacatctaacgttcccttttcaggaaagcaaggacagtgttcttccaccaccctgaatagggtgaccatattttccatggtcactcaaactcctccctgttttaacaggagtttaatatagtagagataagcataatgtttagactctgtgtgacccatacttaccccagacaatacacagacaactcaccaatcatcagggagccgaacaagtgtttctgtggtctggaccaataaacatttctccacacctaccaaagggaatcgggttcccacatgcacttaggataaaaccatgttggcatgccagatattgggggaacttgcccccagtatttcaacataggttctttctattttccataattgtcggccggtctgagaaataaagagtacaaaggtaggaattttacagctgggccgctgggggtgacatcacatatcggtaggaccatgatgcccacctgagccacaaaaccagcaggtttttattaaggatttcaaaaggggagggggtgtaagaacagggagtaggtcacaaagatcacgtgcttcaaagggcaatatcagaaactcctgataagggtctatgttcagcggtgcacgtattgtcttgttaaacatcttaacagaaaacaaggtttgagagcagagaactggtctgaccaaaaatttaccaggctggagtttcccaatcctagtaagcctgagggtactgcaggagaccagggcttatctcagtccttatctcaatcgcatagaacagacattcccagaatggccgtttatagacctccccccaggaatgaaattcttttcctagagtattaatatcaatattccttgctaggaaaagaatttagcgatatctgcactgatttcatattgttcaaacacacgttttacaatcaatttgtacagttaacacagttatcacagggtcctgaggtgacgtacaccttcagcttatgaagataacatgattaagagattaaagtaagacaggcataagaaattataagagtattatttgggaagtggtaaatatccatgaaatcttcacaatttatgttcctctaccgtggctccagccggtccctccatttggggtccctgacttcccgcaacatctttgagcttctttaaaatctatattttgaagtctttttaaagtcttttttttttttttttttttttgagatggagttttgctctcattgcccaggctagagtgcagtggttcaatcttggctcactgcaacctccaccttccaatttgaagagattctcctgcctcagcctcccaagtagttgggattacaggtgcccaccaccacacctagctaattttttttttgtattttttagtagagacagggtttcaccatattggtcaggctggtctcgaactgctgacctcatgatccacccaccttggcctcccaaagtgctgggattgcaggagtgagccactgcacctggcccttttttaaagtcttataaagtcatttcaataatttttttttcttagagtactgaagaattatggaatttctttaaaagtggaataaaccttgcttatctgtgtttcctgtgtatttctgcgtctttatactgatttctgcacatctggagagacaattgcttcattttattttagaatttacattcactggagaaagcttttttttaaattgaagttactatcatgatgtttattgcatagaatcatttggctttactttggggtttgtgcatgggaaagactctgtataagtttcttgagtataagcaaatatatatatatataaacatgttttactggtttaggaatcatgttttctcttaggttgatttttaattctaagtctcagaaaacaattattttttctttgttgtgttggtcattgaaagccagcacacctgacctgaaagggtgagaaggtaggtagggtggggggtgggtgatgagaaattacttaatagttttaatgtacattgttagagtgatggataccctaaaagccctgacttcaccactatgcaatctatgcatgtaactagattacacttgtacccaacacatttgtatagataaattgaaaagaacaactagagtttgctgtcttgcttattcatacatacaaatatgttataaatgtttcccatgacattaactgttgtagatacaggagttagaaattatttaggcagatagtgagtgcaaggaagtccttggtaaagtttcccttctaataaaaagcaacacacaaattatttcttttttgacaaagagcagcctgtaaaatcgagctgcaaacatagataaccaaggtggaagcttgcatgaataaatgccagcagctgtgccaataggaaaggagctacatgtggactgcgcatgttcaaaatggtagctccatcttcccttgtctttgtaaaccagatgtagagtaagaagcaggcaacacagtgctggcaaatgctccgtttgcataatagaagattagggtggggcagccaggtttctcatgcactctgtaaatgtccacacctgatccaaccaatctttgagccctatgtaaattagacactgcctcctgaagccagtctgtaaaatccgctgtgcttcactgagggctggaagtcccacttgggtgccccactctttttcaggagattcaggagagagagctattctcctttcttttgcctattaaacctccaatcctaaaccaacttcttgtgtgtccatctactcgatttccttgacatgagatgatgtatctcaggtatttaccccagacaagtgaccctgcttcattatgttaaaactaattaatttattagttaaaattgctatattaagaaatatagcacattttaaaggccactgatgcaaagtgcaaaaactgctacgtacaaacatgacatcaaattatacttccagtaacagtgttagaaaattcttgtttccctacacttaccatttatgaatagtttaatggaacatgttatttaaaaaaatatttcccaggctgggtgcgatgcctcacacctgtaatcccagcagtttgggaggctgtggtgggcgaatcacctgatgtcaggagttcgagaccagcctgagcaacatggagaaagcccgtctctactaaaaatacaaaattagccagcgtggtggcacatgcctgtaatcccagcaacccaggatgcttagttaggagaatcacttgaaactggaaggtggaggttgcggtcagctgagctcacaccattgcactccagcctgggcaacaataacaaagttccgtctcaaaaaaaaaaaattgaattgcttagtcatgtcttctgcttattttgctattgaattatttaactttttactgattcatataagcttttggcatgcccattacagtaatcgtttgtccaaaattattttacacatatctccattcagctcccagtgtccaggttcaatatttttgaaagaaaaggagtccctgctttgtaaatatgcctactctttaaagagtttaaatactaattagtaaaaccctgttagggaagattaaacattgtctaattgaatttgatttgtggaaaataaatatctaacttttccattatgatttaaccatgtttacgaaggcagcccatacattctgggctcaaaagtctcttaaaaaagggaaaatgtattctatcaaagagggtaccagattccaagtttgcattgcactttgctgaacacattgtcttttttcaagcttaaactttttgaaaggttaccagtgttctctctgaaaacacagagctgctcatattacagccctgctgcaaaacatttgatggctcataacaccctacagagctgagcccccatcataattctaagcaatcattcatgtttccaacatctcttattgtctcatctccacacgaccctcccaaactatattcttttctcacactccacttgtcctaccctgtcatcaaataagcctcatatttttctacttcaaatcctgtacttaaactgctttttttggtttaaatgtatatttctcctttcccacattcttctactccacatggaaaagctgcacatgtgagagtatcaccttttctttccactgcagcttctcacttcccagttctccacttcttcttgctgattgtaaggcactggtgaattttagaactggaatcatattatatccatctttgcagttctagagcctggtaccaggtgtagatgtcaagaaatggttcccaatgcaagcttgctgatagtgatcttcaacagatgagacaagaaaggagccagaatgctagtctactaatccatattgctttccactattattttgctgaaactctcccaatgtcataagaaaaataacaatgaaaataataataatagtagtaaatacagaagataagtcagtgaaaattgagctggtagcatgcatgacttcaattctctatttattactagtttcaaaatagtccttatccacaaatagaagaaaacagacccttaagtgtctaccacaatgcaagacctgccaatttcataacttgctcaggcacacttataaaagaaactagacacactggtgaccccatctcaaacacactcaaaggagacagaagatcttcctctcactgtcctccagtacatgttgctcctcctgcttaaaaaagcaatacaacaaagaaataataccttccagaggctatcacatttgatcttggacaaatttttagattagtaatcaagtcaattcaactgttgcccttacttcactcatatcacatgttatgaaccacttcggatcaccccagtgcaaattctgaggcaaaaccttgattttctatgttatgtaaaataacaatagacctgtcctcaaggcattggccctacccaaagcaaaattaaatttcccaaacacttatgagtttacagtttcaaatctcttcaaaagtaggtttcatatgagtccttgaacagggttcagcactttcagtgagattaaagtgggtgtccacaagagataagagagcccccccactacccaccacacagaggaccaacagaattgtagaatccatgcccaccatttttcacttctagcatatctccccccatgtgaaagaccacctcccttccacatactatcctttccaatgagaacatgttaaaaatttcatccttggcagtattttttcagggttctactgtacttttccaccgggcctcagtctaccagcgttctgctttagtgtcttgttgaactccccctttttaagggcaaacaaatccccgtcagtcagttcacgtactaacatgacctctgcaagcccctcactccacaaaacaccaatctccattcctgaccatcacagaagggaaggtctaacttttgtggtcaaatattagctaaaatgagctgttgaatagctaggctgtaatttatttctggaaaccagaaccctgagttgacacacttatattcttcccttggtttgaccatcttttcccttgatgtgcctaatagggagaactctgcacacaggaggttttcagttagtgtttgtttggtgagcggatcatgtctctatggtaggtagtctggcaggggtaagaagcacagtcctttttcatgatattgattcttcctacccatgagcatggaatgttcttccatttctttgtatcctcttttatttcattgagcagtggtttgtagttctccttgaagaggtccttcacgtcccttgtaagttggattcctaggtattttattctctttgaagcaattgtgaatgggagttcactcgtgatttggctctctgtttgtctgttattggtgtataggaatgcttgtgatttttgtacattgattttgtatcctgagacattgctgaagttgcttatcagcttaaggagattttgggctgagacaatggggttttctagatatacaatcatgtcatctacaaacagggacaatttgacttcctcttttcctaattgaataccctttatttccttctcttgcctaattgccctggccagaacttccaacactatgttgaataggagtggtgagagagggcatccctgtcttgtgccagttttcaaagggaatgcttccagtttttgcccattcagtatgatattggctgtgggtttgtcatagatagctcttattattttgagatacatcccatcaatacctaatttattgagtgtttttagcatgaagggttgttgaatttttcaaaggccttttctgcatctattgagataatcatgtggtttttgtctttggttctgtttatatgctgggttacatttattgcatttattgatttgcatatattgaaccagccttgaatcccaggtgcacatgtaccctaaaacttaaagtataagaataaaaaaaaaaacagtcctggggacaaacttaacagtttgagttctaatagctggctgcctctctgggtctctattccctcatcttaatcttcaggataataattacatctacatctctttttctttctttctttcttttttttttttttgtttgtttttttgagatggagttttgctctgttgtcaggctggagtgcaatggcacaaacttggttcactgcagcctccacctcccaatgaataaaaaagataatgtgtaaaaaataattaggatcctggtagctagtgctcaataactgttagatcttaagacttctgcttctactgctatcatgatgagtgtgtttggcttaacaggtctagcgcaggtagaagagaaatagaaacacttaacccctggtttatctgatttaatgcaaatacaagcaaacttggctaagaaatgcttttcaccaaagtttgtctgcaatttgaatgctttagattaaacttagaagagtatttaaaagtattctagacaggccaacagcagtggcacccacctgtaatctcagcacattgggaggctaaggagggtggatcacctaaggtcaagagttcaagaccagcctggccaacatggtgaaaccctatctctgctacaaatacaacaattagccaggcatcgtgataggcacctataatcccagctagtggggaggctgaggcaagagaatcgcttgaactcaggaggtgggtgttgcagtgagctaagatcacaccactgtactccagtctgggagacaagagtgagattccaactcaaaaaaaaaaaaaaaaaaaaggcactctagacagattcatttgtaatataagcatgtcatagtttctggtgtataggacttgatttctgtttatttagttttctgaagaaacacaagagacagcccctagctactacaaaacttcctagagacaagctggacatatgagcccttacaaaattccatttactgtaaagataataatgaaataatctctaaacataagaatttgactagtgttaaccactccacttccccaatacactgatgtttatatctctttcttatcataatacaaaacaaacacatgaccacacaccatctgctctccagtgcagaacagaataacagaggcacaaagcaagcttcagaacacacagaccaccatgttcaccacatctacatctggggctgcttaagaaaaggagcaaaatcaatgagaaactgagaagatgtgtgactaccctgttttcagcacttattgtcacaagaagaccgaacatgcacacacactctctcattccaaggcagagcatccattttcctgtcgaaaaagtaatttgacagcatagatccctatctcacattctgagcaagatgacactggctttgggcatgcaaagaatgggcatattacagacacccttaagacacaacgcatggcctgccttacctgatacaatttttaatttctctgaagtaaactcaaattacttcttaagtaaactcaaatttcaaacatgtatttctttattaacattccattaatttcctcatgggcttcacaggaaatatattctactttcattcacttaatctcaccataatagatggtctaaaatatccagaagacagccatatgtaacacatacccataccccaaagcatagaaaatgtaacacacaaaggccttgaggaagcaacactataacagtgcaaatacacaaatatttaaggaagaatacatcacccaacagacagcatacatggtcaccactatccaggactctccataataagtagctatgaattgcttattctaaagttggcttatatatattcatcaccacaaattagttctgaacatactgattttaattttggatattcacaaggtaattatctggtaaaatatatttataactaatttgtaattagactactaaatgcacgcatatgcttaggtcacagtgaggcaaaaatctgagttatttgtagagtaaattaagatttaaatttttaaatattaattaatttttaaattttcaaagaatgctgtcatgcaggcctgcactaagtcaagcagatgactgacaaccaccctcttctccctgtctcctttacacaataaatgtgaagggctctagaagctcaggcccttcttcaccagaagcaaggagccctctgacctattcttccaaacatactcttttgtctttgtctttattcctgcatttatcctcctttgttcagtccaccagggtcagtggcaaagtggtgtcatgaatagggacttcgaggaagtgaacgaggaagatctgctggagcacaggaagtgaaatagacaagatgaatggggaccccaggacaaatatgctggcagtggatataaggtcagtgctctaaaaaagtactgggaatgggaagtttctgaatgacggtaccatggggcagcatttgtctgttgaagaaaaacattatgtgcagttgcctaaagttgtgttgaaacagtctggatctcaagttaattcacagacattagctaaacttctgcaggaggttattacacataacccattgtttccacaggcaggccctcttgatgtggaaaattgggacacagtaggagagggattgaaatgggctcatcaaaaagtctcaaagtagacccttctgttttttctgcttggggtttggttcgcatggtcctactgctgctgtctctttattctgccaggcaacagaagtcagtttctgagtctcaagaattaaaaaactcatttgttcctccaacagtgcatattgaaaataatgagcaggagaaagggggagaattggccatttgctaagcagaaaaaaagagaggagaattggcctctgccaccccctccaataacagaagtagaaacccccacacaacaaattttgcatgctgctgctatggcaagggaacttttgggaccttatgcttttcctattaccataaggcttgatctgaatgatccaccacatttttgacatgaacacactcttgtagagtttaaattactaaaagaattaaaaactggtgtggttaataatggagtgcaaagcccattcactatagggctgttagaatcggtgttcagagccatgtgccttccaccttttgatgaaaaacctttggcttgcacttgcttatccaccagtgcatatctgacatggagtttaaattggcaagaaatgtgtgcagaccaggctaggcagaatcgcaccgctcttcaaggaaacactacagaggaaatgttgatgagctgtggccccttttcagatctggtacaacaattaacactcccatcagagaggccacttaccaccagtcttccttagccaccaagcatgtttggagcacaattcctgaagagggagttacagtgcagtcttttctacatgtcacacagggatcacaggagccttatgcacaatttatcgcatggctgcaagatgcagtgcagcatcagatcactcatgcctctgctgcagaaatgcttaccatagctctagcctatgaaatgcaaatgcagattgcaagcatgctcaagcaatggctagtttaatagttgacaaatctaaaaggagccaaggatcaaaccctaaagtgggagaatgttataattatggaaaaactggacattttaaaaaggaatgccaccccagacctcaggacaaaaaggatcttacaatgtggtgcccccccccgcccagtggaaataatgccaggactctgtcctctctgtaacaaaggaaatcattgggctcaccgatgccactcaaaatttcatcacaatagcaccccctgtcaggaaatgagaaggaggcctggacccaggcccctcaagccatgagggcattcccagttcagaccacaaccccacttcaggggtgggtcccaggaggaatattgattgattccctctccccaggaacaccaggaagtgcaggattagatatccccaccagagatagaattacattagttggagaagacaaaccttccaaagttcccactggcatttggggacatttgccagcagaatacatgggactaattttaggcaaaagctgccttaacttgcaaggcatcactgtagtccccagagtagttgactctggttaaggagaaattcaaatagttttaatgtcaaaagatctttgtgtttttgaaccaggggaatatatagcacaattattgcttatcccctgcaaattacacccttctgcatgaaaggagaaatgaggaaataaagggtttgggagcacaactacatgcaaaatctatctattccaacccttagcctctaatagacccacctgtttggtacaaattaaaaaaaaatgtatgggcttatggacacaggagctgatgtgtcagtaatatccagtaaggattgacccccatcctggcccctcagactaatctccacatccctagtgggagtaggagcagctcaaagtgttcaacggagtgctgagattttaccttgtcttggtccggatggacaatcatgtactttccagccttatgttgcaaatatagctatcaatttatggggtcgagacttacttatagcattggatatgagacttacaaatgaaaactttaataacctaggatttaaaatgtcaaaggacatggaatatcagagtgggaaaggtttaggaaaattcctacaaggaaaccctaacccaatatcaataactggaaagacagacaaaaaagactggggccgggtgcggtggctcacgcctgtaatcccagcactttgggaggcagaggcgggtggatcatgaggtcaggagatcgagaccatcctggctaacacagtgaaaccccacctctactaaaaatacaaaaaattagccgggcgtggtggcgggcgcctgtagtcccagctactcggaaggctgaggcaggagaatggcgtgaacccgggaggcagagcttgcagtgagcagagattgcgccactgcactccagcctgggcgacagagcgagactccgtctcaaaaaaaaaaaaaaaaaaaggattgggacatcaggatttattattggggtcattgatacttttccaccacccactgccttacctttagaatggcttagtgacaaacctgtgtgggtggatcaatggcccctaacacaggagaagctagctcaacttcatctgttggtgaaagaataattggatgcaggacatttagaggagtcagttcccggaattcaccgatgtttgttatcctaaaaatagtccagaagatggcgactgctgcatgacttgagagctattagtgcacaaattaaaccaatgggtgcattacagcagggcttgccatccccagcagccattcctaaaaactggcctcttgtagtaatagatcttaaagattttttctttactataccattacatgagaaggataagcctcgatttgccttctctgtgccttctattaatcagagacatgctacaagccaaatgggtgagacatccggtcatgtatggtgacactgtctgtcgccgtttgctcatatggagatttctaaacaattaaaaactgacaatagacctgcttatactagtcatgcttttcaaactttcctacagctttgggctatgacccataaaacaggaattccttacattatagaccaggcacatcaaacgttacaacgcatgttgagaaaacaaaaaaaaagggtgattggacaccagccaccacctcaaacaaaactaagtttatctttatttactttaaattttttgactccttgtatgaatggtaagactgcagcagaaagacattggcaagtgttagaggaaattaggaaagtttatctgaaattattatggaaatccctggaagaaggacaatggaaaggtatggtggatttactgctgtggggacaagggtatgcttatgtttttacagcagatggataaaccatgtgggtgccctcaaggtgcgtgcaaccatggaatggaagactggaggaacccatggtggccaaccatgggcccggtccctctggtatgggccatgagccagctgagcctgagtgcaaaaatggacagaaggccaactggagtcatggtgacatcaacccctataacctgggggacactcaagaaaaccatgcaggaagctgagaaactactggagcgtcaaggccagaaaaaacccctgattccatgttcttggccatgttagctataatgccctgtgtggtaggttttcccttgcagagtcaaaaacatattgggcataggttcccaatcctccagcagtacaacctgtactttggagtgacactcctcctgagatctatcgtgatcagggagcatgggctccaggacccctatgtctggctcccccggacatagaacagttagactctcagaacaatgtcgtcaattatactaccccactggaaggactccccttgtgtatcactacaaagatgtcgctcaaccatagctgtcttacaactgaagctcaagcatggttgagtcaccttggaaaagttatgtacttaatagttcttggttctatttatgtaactggtgtgctaaccaaccatgcccggcccaattgccccaactgtgctgactatatggaatggattcccttcaatagttctgacctctctccattgacccagtgtcttggcccactgggtagaaaagaatctgtgttaactggagacattgtggattggggaactaaaggtcaactagatggaaaagaggaaaatcagaaatcatgacacaaacttcactgccattggtggcaagctttgaatactccttctttataccacaccgggatccaatcccagtctgccacctggattgcttggcatggagcaggctttagcacacctcttcctcagtggcattatctagggaggaaaggtccaattcaagaaacaatatggaaagcagcactgctgttcacaaacggtagtatccgggtaggaacactctctaataccagtactgctactcaacacagtcttaatgtcacatttgtaaagaatatcaccactcaacttatggtttgtggttttaatccttatgtctttttggcagctaaggcggaccagctccaggtaagcaatactcaattgaccttaaatcttgctggttatatcactgcattaatcatagcacattgcaaacatgtaatatctctactttgatatttgggtcacattcctgggctatggattctcattaatctgtctgagccttgtgatgccacccctgtttggcactttgtgaaacttcttctaactaaacttactcatcatgcctgtagagcctcaggcatcataatttttgctattgtttctttggtcacactaatcacttctgctgtaatgtcctctgtagctttgcatagttctgttcaaatggctcagtatgtagaggactggaggcatgcagccaactaagcatggctacttcagagtaaaattaacactgagttacaaactgaagtggtaatattaaaatccatggttctgtggttaggggaacaagtacaaagcttacagttgcaacagaaattgcactgtcattcacactcatatttgtgtaaccaacttagaatataaccaaagagtatccatgggaccttgtaaaagcccatttgcagggagctttcacatccaacatcacctttgacattggtgaattacaaaaaaaagttcttgatttaaataagcaaactcaagagtttcagccttctttagaagcctggactgaattccagcaaggcctggagagcctcaatccttggaactatctaaagtaccacattaacatctcatatatagttctgggaataatgttgttctgtctctgtttcctgctcatagcctgtaaaatcagatggattgccaatcagaaaataaagctgcccaacctggccttacattcattcaattaatgcaaaaacagaaagggagagatgttgggatccagaagcctgaggattgtgaccaacacagcattccactggaagctatatgatcaaagagcaaactgtttatcatgaatgcagaatgtgggcaaactcacatctgcacctgacactggaaggtatgctaaggggagccactccctggtgctgtgctccttgagattatctactgggacatctggagcctactgtttaaagaatgctgtcatgcaggcctacactaagtcaagcagctgactgacaatcagccccttctccctatctcctttactcaataaatataaagggctctagaactcagggcccttgttcactagaagcaaggagccccctgaccccttcttccaaataaacttttttgtctttgtctttattcccacattcatcttcctttattcaggccaccagtgtacatggcaaagtaatcaaaatacagtagtcagtgagcaccaaccatgcaattgtgctaggtaaggagatggaaaaaatatttttgaggtgggagaaacatcctaacagataaattacagcagacagacttgacagatgggggtaacagttattaggaacaaaagactgaattctccctagaaaaggtagtatctgagatgggtcttaccagaggagtaaatgttctttgctggggtaaggggatggacacacaacaaaaagaacaacccatgcaacagcacagggagtaaataattattcagtgtggcactgatgtggaaggtagagacaagagccaacactagaaatttggcttgtctcagcacttcgggaggctgatgtgggcagatcatgaggtcaggagtccgagaccctcctggccaacatggcaaaaccacatctctactaaaaatacaaaaattagctgggcgtggttgcatgtgtctgtaatcccagctactccagaggctgaggcaggagaattgcttaaacccaaaaggtggaggttgcagtgagacgagattgtgccattgcacttcagcctgggtgacagagaaagactccgtctcaaaaaaaaaaaaaaaaaaaagagaaaagaaatttggtttggaagcagatgacggtctttgtaaaacaagttaaggagtttggatttttctttttgtagacaacagggagccaagaaatattattaggcaggcaaacaactagagaagctttagtttttgaggatgatgactctgacagcagggtggaaaattaacagcagcagggagaaattagtggcagaaaattaacttaagaggtgtttatgactcaatgatggccttaggtcagaagtgattaaacagccaaagtcagtgactggagcatggttttgggggagagcctggtgactgattggacatgggggtgagagagacatgcatcaggacagccatcagtaatgttcctggcctagtaggttgtgtacattgcaatcatcttccagaagggatggagattactttcattattacaagtacctacaggatgagggatttgtagtatgatcaggatgacaaagagtacagcttcagataagttgtaagtgaaaatatagtgttagagttgccagtttataggttagaggagaggtaagaaaagcacaagaatgcacaggtcattctgcaagaacaaaactcactcccaggtatgggactgcaaaggtcgctgcagagaacaggcattgggtaactggcaactgacaccaatggaatgcttacagtctgtccacagatttaagatttttaaaacaactattctcaagtgttgcaaatgtctctaaggtaagtgggggcccagagcactttgggggcaactgtctgcttactgcaggcagccctttcttatctggaattcagtctcctcatcttcctgccttctcccttgcatatctcctgcttgtgtaatagggtggaaagtgggagggcaggacaaaggtcagaccaatagcactggttagctaaaagatcactcctttcattctactagacagttctggtctgaggcctgggatcccagaacataaaattattactctgtcctttattgcatccctgtattatccccatttccctcagccagagcatctggctgacatccaccctctcaagaggacatgtaggacagaagaccaggctcagaaaaactgctgtttgaaaagggcaggtagttaagtaagaattttggaagaacttgagaaattaaaattacggagactatgaatgcaaaaacactaactgtcaagcaagtaagagctaatttaaagaacttttttaaaagatatagtccacataacttgaaacatgcggaagactggcagatgactgcatcagagcgaatttcctaaataactgaggaggtgactgggaaaactgagccacctaccaaaacagctttacagagccaatgcatctcaattgttgtaaaagaagatgagttctagaactcttatttactatggagttttcaaatacattgaacatcacttaatgttttcctcaatcccaagcttcttgtaaaactttgaccttgccaaccatggcaccttagaggcagatgaaagcttacctattttatggaatttcagatttctaaatatagcacatgcaatacagggaatgcacccagtgtgcttgtggatgcaataatgaccactactacacctctcaagcaggctttgttgacttcagctctcctgacatttggggctgtcctatgcattgtaatatgtggagcagcatttctagtgtctgtacactaaaggccagtagcaccctttcccaaagcaagacactaaaaatttcaaaattctggaaaggaaatccacagtagacacccacaaagcttcctgatctcaaaatataccactttattccatatgtaggttttgagtttctgaaacatttgctttatgcttacaacaatcccatgaggtagaaaagctactgacaagatgcctgtcatcatattcatcaatggcaatgccaccaaaagctaaagtttcattttaaattcccttataccttcaaatcaactgaatttattttgaaaaaaaataatggtcttctttattaaaaataacagcacacatatacagaggtaaataagcagtatacatttaaaactacattgttttgagatcaagctgactgtataaagcagctgttccatggggctaagcaataggaactgtggatcctgagcttaatgtattgccagcccctgggtagatcataaagcatctataacagtagtcaatatgcccacccaaccctaatagttttgctctgagtagaaatgtgaaatctttgctgagtgctttcaaaaaacagggtgaaaataacttagtccaaaaaggtacaccaaaataaacaaggaatattttaaagtaattaaaccaccagaaatatcagacattttctataatcctaccccattgtctctgagaaaagggaaaaagaaaatacaaagcaagctatccaaagacaaatacagcttttaaaagctctatctaattaaccccaccaaaaatttttttggctacctagtatatgcaggctctgcacaatgtgggacagtggtccccaacctttttggcaccagtgtctggttttgtggaagacaatcttcccacagatgtggtgggatagttttcatttgggatgattcaagcacattacacttactgtgcactttgtttctcttatgattacattgtaatagataatgaaataattatataactcaccatattgtagaatcagtgagagcactgggattgatttcctgcaactaaatgttcccatctgggggtgatgagaggcagtgacagatcctaaggcattagattctcataaatagtgtacagcctacatccctcacatgcacagttcacaatagcagttgcactcctatgataatctaatgctgctgctgatcggtaatgcaagtgatggggagtggccatgaatactgatgaagctttgctaacccaccattcacctcctgctgtacagcctggtttgtaacaggacagactggtatcagtctgtgctctggtgttgaggacccctgacgcagggcaactacatttatttatttatttatttatttagtgcaatggtgcaatctcagctcactgcaaacttcacctcctggtttcaagcaattgtccagcctcaaccttccaaaatagctggaattacagacacatgacaccacgtcctgttaattttgtatttttagcagaggtggagtttcaccatgttggtcaggctggtctcaaactcaggatctcaggttattcacccacctcagcctcctaaagtgctgggattacaggcatgagccactgtgttcttctgacaactacatttattaccagccatttattaccaggacacctatgttgtgcagtgcctggcatacaccaggtacttaataaacagctattgatctaatgcaggactaataaggtaaggtgtattttttctccttctacatgctgtgcctgtgtcagatgcaaataagacctcaggagtctgcctgaagagacttaaaataaaactctttcatcaagcagtcacttggatggtgtaacaagttacatatgaatgtgtcacctgtaacagcttagtgacatgcatgtttaccatcacataacaaacacatgtctgccatgctcagggcttagagtctgaatttctaatgagaaataaagtggtacctagaaaaccccagaaatgatactccatatatccataagcatcagtagcatttccaaaaattgtcccacatccaacaaatcctttaaaaacaagatatgctaacatgcatccagtttagcggaatttctaaaaatgataaacagtgcaacttcaaacacctgaaatggagcacaagacccttttgaaggaattcatatccattcctgcaaaagttctgtggactcttgaaggtagcacagaactaagcattttttgtgtgtttccaaaaggttttagcctagcctttggcctctaacagactctctgattaaaatatggcttagaaactctacctgcctacttgaaaaagcatcaaatctggagaatgcttttcacgggtgtgaaaaaatgaaaacaaaatcacattcttctctttgcaattccctttcccccaccttccacttctattaaatatacttcagcatcattgtgcataggtgcagggaccattacatatctaaaaaaggaaaaaaccctcaaatatatggggatgcactggcaactttgcctttgcagaaatcattttgtttccaccagacagaagcgtctcactattttcagcattctcatctaacaggcaaattttgtttttattgactttgaaaggggtaagcttaaatctaaactcttaaacaagaaccagggttcaattttctgttaatgaaattcccagacaggtttttcaacctaccaaatcattatagtttttattcacccttctctctctcttcacaaccactaacatcaccacccacaaaagaagaagacaatccctccaatgttccccaaacgtgtgctgctgctagctcagaagttgtgtagagttttgtaattgagtgtgaaccgctggcctggatctgggctcgtgaatcacatgctcgatgcgcctctgcccagaaaatgcgctgcttcccagggaaagcgtcggctatgggaaggacctcccctgctccttagcaaacattagggtcgcagtttcctaagagacacgagtgggaaatgggggagtattggagaccagcctcaacaccacctgtggggtacctgaagtccggtggtgacgaagtaatgagaagagacaagagtgcaaaaggatgggggccagggggccagtgcaattcagaggctgcaaaggcgctgatctctggcctccacactatttattgagtacaatcacttagatctaagaagcagatgttcaggggtgaaatggtgaaagggaggtggtgtgtcacacacctaatctatagcagtggcggtttaggtaaattttctttgtgctgaagcagcataaacttaactactgatttattctttaacttatcggagagcagctgtggggggtgggcctaactaggaactagcaagtatggccacattccaatgcttcaaaggagtgtctttctccttgagcacagtgtttatagataagagagcaggtcacgctcttgtcatgggaacatgatggtaataaagaggctttcctcctcagaggcctcctgtggctttccacaacttatagtcccatatttttatggccagtttatacaggcactccataagcctttttcccagcaggggagggggcccaggcagaggctggtgctggggttagagaaagctacactaggtgtctggctggtgtgggagcaggaagggaagccccagaacaagccacaaattgttccagcaggagtaggccccctgcctttttcctggactaacgacggcacccggcactgagcccctcacttctgcaaggaagtgctctccacaccgacggtccttgtgaaacacgcaccccactgatggaagggtgaggaatgataggcgccccatggccaggccgtggcccccttctttcctgggcgccttaggtggtagtcagccacaccacaactgccagccaggaaagggtaagggcgtagggctgcctgctgccccctcagtgccagtgtcctctgcccagaaaggtcaaatcggcagagcagggtgcggaaagcaccctggtgagaacaccctggtgagaacaccccaggaggccaactcctggccggcacccacgatgctttctggctgcagaggaaagcaggatccctagtttccaggcttccctgccagagagagactggaaagaccatagaaggaaagtttctcctttcacagggggaaggatacagggagacagcgcagaagttggagagcagcatcgaaatgtttctggcctatgtggcttgcaccatccgattcccggcagtgttataacagataaattcatcccagtattccgggaggccaaggagggcagaacacatgtgcgcggaagtttcagaccagcctgggcagcatggtgagatccaatcactacaaaaatagttaatcaggtgtggtgggccacgcctgtattcccagctactcgggaggctgaggtgagagaatctcttgaggctacagttagtcataagcttgtgccactgcactccaggctgggtgacagagtaagaccctttctcatagaataaataaataaataaataaataaataaataaataaacatataaataaactcggccgcctgggttgggccggattcttagcttccaaaagctaatattgacgcacttcaggtcttgctagcacagcgctgcagagactgccacaaagtgtgctgggtgctgcttgttgttgccagtggctaggtaagaggcggagtaagaatgtaggagtggagaaaaaggaggagaaaaagagaagagtagaagagaaggagaggtgggaaaggaggagagataaagggaggaggaagtgagagaagaagagaagaaaaaatgcgaagaagatagaagagagaaagtggtgaaaaaaccggaagggaacaatgggactagaagagaagaggagaaaaaacctggaagaaggagtagagcaggagaaaaagagaaggaggaggaggagaggaaaaggagaaaggtgaggagaagaaggaggacgaggagaagaggagaagaaaataggaggaggagaggcgagaaagagcaggagaggaggaggagaggagaaggaggaggaagcaaagtagagtataagaggagaaaagggggaggagaagagatgaatgaggagagaaggaggaggaggagtaaggaaaagtagaagaaaaaaggagaagaggaggagaggaaaaggagtaagagaaagcaaagagaaaaagaaggaagagaggaggaaaaggaggaaaagaaaatgaggaagagtagaggcagaaaaggaaaagcaaaaggaggaggagaggagaaaaaggaggatagaaggaaaaggaggaaaaagaaaaaaggaggagaagaggggacagaggagaaggaggaggaggaagagaagagaaaaaagaggagaggaggagaaggaagaggagaggaggagaaggaagaagagaggaggaatggagaaaggaggaggagagaagaagaaggtgaaggggatgagagaagaagaaaaaggaggaagaggaggaaaaatgaaggaggagaaggtagaggataaaaaggaggagtaggagtggagaagaaggaagacaaaaaaaggaggtggaaaagaaggattagaagaggagaaggaggagaaggaaaaagaggaggaaaggaggaagaggtggagagaaagagaaagcagggaggaggatgcggtggactaggacgtggaggagaggagaaggaggagaggaggaggagagataaagaaggaatagtaggaggagagaaaaaggaggaaaagaggagagataaagaaggaatagtaggaggagagaaaaaggaggagagaaggagaggagatggaggaggaggagaggagtaaaaagagaaggagaggaaaagaaggagaagagaagaaggagcataggaggaggaggaggagaggaggtggaggaggacaaaaaagcaaaaggtgaggagaaggagggggagagaaaaaggaggagaggaaggagaaagagaaggaggccaggagaaaaaggagagggaggtggggaaaaggaggagaaaaggagaaggagaaggatagaaggaggagaagaagaaaaggaaaggagaaggaagagagaaaggagaaaaagaaaaaagaaaaaattagaagaagaaggaggaaagaacaagaaggaggagaggaaaaggaggagaaagtggataagagaaggggagtggaaagaaaaaaggaggagaggaggtgggggaggagaaaaaacgaggaggaagaagaaggaggggaaggaaaataggtggagaaggaggaggaagagaagaaggagagcaggagaagaggaagagaagggggaggagaggagaagaaggaggaggactagagaagacgtaggagagaaggacttggagaagaggaggaaaggaaaaagagaagaaggagaggaggaagagaagaagggaaaggaggagggcgaggagaaggaaaggagtaggtaacaaagagaaggagagaagaagaaaagtaggagaaaagaaaatggagaaaggagaataaggaggacaggagggaaagagaagaaggaggagggaaagaagaagcggaggatagaaggagtacttagagaggaggaaaaggtggaggaggatagcagaaggaagagaaaaaggagaaagaaaggaggagggggtggagagaagaaagaatagaggagaaggaggaggagaagaggaggcagaggagggggaagaaggagaagaggaggaggagcagaggaggaggaaaagaggagaaggaggagtagacaagcaggagaagagaaagaagaagaagcagaggagagaaggagaggaggaggagaggtggaggaggaaaaaagaagtagaggaggaggagaggaggaggaaaggaggagagaagggggagaggaggagaaggaaaagggaaggagacaggagaagaaggacagggggagaggaggagaaaaaggagaggaggaggacaggaggagaaggaggacaggaaaggaggaggaagaggagtggaggagaggataaaaagaaggtggaggaaaagaggaggaggaaaaggaggtgaggagaaggaaaaggagagaaggaagaggaggagtagagaaggaggacaaggaggagcagaaaagagaaaggaagaggagaaggagagaaggaagagaattagagaagaaggagaaggagaggagaaagaggatgaaaggagaaggaaaaggaggaagaggagaaaacaaggagaagggggagaagaaaatacataggagaagaaagaggaaaagaaggagaggagaagtaagaggagaggaggaggatgagaggaggaatggagcaggaggagtagaggaggagaagaggagaaaaaggagaaaagcagagaataaggaggaggagcagaagcagaggagagagaaaagtaagagatggagaagatgaggagcaggaagaggaggtggaggaggaataaaaggaggagtaggagaaaaggagaaagagttggaaaaggagaggagaagaaggaagagaaaaaagagaaggaggagaggagaaggaaaggagaagaagaaaaaggaggaagagaggaggaaaggaggagtagggggagaggaggagaaagaggggaggaggaggtggatgagagaagaaagaagaaaggaaggagaggaggagaggaaaagtaa
